(19) United States
(12) Patent Application Publication
(10) Pub. No.: US 2022/0127621 A1
(43) Pub. Date: Apr. 28, 2022

(54) FUSION PROTEINS AND FUSION RIBONUCLEIC ACIDS FOR TRACKING AND MANIPULATING CELLULAR RNA

(71) Applicant: The Regents of the University of California, Oakland, CA (US)

(72) Inventors: Eugene Yeo, La Jolla, CA (US); Frederick Tan, Encinitas, CA (US)

(21) Appl. No.: 17/049,198

(22) PCT Filed: Apr. 22, 2019
(86) PCT No.: PCT/US19/28580

§ 371 Date: Oct. 20, 2020

Related U.S. Application Data
(60) Provisional application No. 62/660,849, filed on Apr. 20, 2018.
(60) Provisional application No. 62/665,860, filed on May 2, 2018.

(51) Int. Cl. C12N 15/62; C12N 9/22; C12N 15/11; C07K 14/47

(52) U.S. Cl. CPC C12N 15/62; C12N 9/22; C12N 15/11; C07K 14/4702; C12N 2310/3519; C12N 2800/80; C07K 2319/00; C12N 2840/203; C12N 2310/20

(57) ABSTRACT

Described herein are compositions, systems, methods, and kits utilizing RNA binding protein fusions, such as CRISPR-Cas protein fusions comprising a guide nucleotide sequence-programmable RNA binding protein, and a translation modifier protein. Also, described herein are compositions, systems, methods, and kits utilizing CRISPR-Cas associated RNA fusions comprising a guide nucleotide sequence-programmable RNA and an internal ribosome entry site (IRES). The compositions, systems, methods, and kits described herein are useful to upregulate or downregulate mRNA translation.

### CROSS-REFERENCE TO RELATED APPLICATIONS

[0001] This application claims priority to U.S. Provisional Application Ser. No. 62/660,849, filed on Apr. 20, 2018, and U.S. Provisional Application Ser. No. 62/665,860, filed on May 2, 2018, both of which are herein incorporated by reference in their entireties.

### STATEMENT OF GOVERNMENT SUPPORT

[0002] This invention was made with government support under Grant No. NS103172, awarded by the National Institutes of Health. The U.S. Government has certain rights to the invention.

### SEQUENCE LISTING

[0003] The instant application contains a Sequence Listing which has been submitted electronically in ASCII format and is hereby incorporated by reference in its entirety. Said ASCII copy, created on May 6, 2021, is named 15670-0310US1_SL.txt.

### BACKGROUND

[0004] There are currently no consolidated systems that can both upregulate and downregulate the translation of specific messenger RNA (mRNA) targets. Known methods to achieve targeted downregulation include anti-sense oligonucleotides (ASO) and short interfering RNAs (siRNA). However, both of these technologies function to destabilize a messenger RNA target and downregulate translation, rather than upregulate translation. There are few known methods to increase mRNA translation and these methods are not well characterized. As such, there is a need to provide compositions and methods for recruiting translational pre-initation complexes in trans and thereby control translation in cells and in gene therapy techniques.

### SUMMARY

[0005] This disclosure relates to compositions, systems, methods, and kits to control mRNA translation in cells using CRISPR-Cas protein fusions. These compositions, methods, systems, and kits utilize the RNA targeting abilities of CRISPR-Cas systems, which use a guide RNA to provide a simple and rapidly programmable system for recognizing RNA molecules in cells. These compositions, methods, systems, and kits further utilize the ability of CRISPR-Cas systems to bind target messenger RNA to initiate translation in trans by fusing a ribonucleic acid sequence, that recruits translational pre-initiation complexes, to the single stranded guide RNA and thereby to the bound messenger RNA. CRISPR-Cas systems also have neutral effects on messenger RNA stability, which makes any measured change to protein expression a function of the fused protein effector. The compositions, systems, methods, and kits described herein provide high utility and versatility when compared to other compositions, methods, systems, and kits for controlling mRNA expression.

[0006] In one aspect a composition comprising one or more polynucleotides encoding: (i) a guide nucleotide sequence-programmable RNA binding protein; and (ii) a translation modifier protein.

[0007] In some embodiments, the guide nucleotide sequence-programmable RNA binding protein comprises at least one of Cas9, modified Cas9, Cas13a, Cas13b, CasRX/Cas13d, CasM, and a biological equivalent of each thereof. In some embodiments, the guide nucleotide sequence-programmable RNA binding protein comprises at least one of Steptococcus pyogenes Cas9 (spCas9), Staphylococcus aureus Cas9 (saCas9), Francisella novicida Cas9 (FnCas9), Neisseria meningitidis Cas9 (nmCas9), Streptococcus thermophilus 1 Cas9 (St1Cas9), Streptococcus thermophilus 3 Cas9 (St3Cas9), and Brevibacillus laterosporus Cas9 (BlatCas9). In some embodiments, the guide nucleotide sequence-programmable RNA binding protein is nuclease inactive.

[0008] In some embodiments, the translation modifier protein is at least one of eukaryotic translation initiation factor 4E (EIF4E) (SEQ ID NO: 52-59), eukaryotic translation initiation factor 4E-binding protein (EIF4E-BP1) (SEQ ID NO: 61-62), ubiquitin-associated protein 2-like (UBAP2L) (SEQ ID NO: 64-71), and a biological equivalent of each thereof. In some embodiments, the translation modifier protein is encoded by a polynucleotide having a sequence comprising all or part of at least one of SEQ ID NO: 52-55, SEQ ID NO: 61, SEQ ID NO: 64-67, SEQ ID NO: 94-193, SEQ ID NO: 285, and a biological equivalent of each thereof. In some embodiments, wherein the translation modifier protein has an amino acid sequence comprising all or part of at least one of SEQ ID NO: 56-59, SEQ ID NO: 62, SEQ ID NO: 68-71 and a biological equivalent of each thereof.

[0009] In some embodiments, the composition further comprises a linker. In some embodiments, the linker is a peptide linker. In some embodiments, the peptide linker comprises one or more repeats of the tri-peptide GGS. In some embodiments, the linker is a non-peptide linker. In some embodiments, the non-peptide linker comprises polyethylene glycol (PEG), polypropylene glycol (PPG), co-poly(ethylene/propylene) glycol, polyoxyethylene (POE), polyurethane, polyphosphazene, polysaccharides, dextran, polyvinyl alcohol, polyvinylpyrrolidones, polyvinyl ethyl ether, polyacryl amide, polyacrylate, polycyanoacrylates, lipid polymers, chitins, hyaluronic acid, heparin, or an alkyl linker.

[0010] In some embodiments, the guide nucleotide sequence-programmable RNA binding protein is bound to a guide RNA (gRNA), a crisprRNA (crRNA), or a trans-activating crRNA (tracrRNA). In some embodiments, one or more kinase phosphorylation domains of the translation modifier protein is mutated.

[0011] In some embodiments, the composition further comprises a vector. In some embodiments, the vector is an adenoviral vector, an adeno-associated viral vector, or a lentiviral vector. In some embodiments, the vector further comprises an expression control element. In some embodiments the vector further comprises a selectable marker. In some embodiments, the vector further comprises a polynucleotide encoding either (i) a gRNA, or (ii) a crRNA and a tracrRNA. In some embodiments, the gRNA or the crRNA comprises a nucleotide sequence complementary to a target RNA.

[0012] In one aspect, a fusion protein comprising: (i) a guide nucleotide sequence-programmable RNA binding protein; and (i) a translation modifier protein.

[0013] In some embodiments, a system for post-transcriptional gene regulation, the system comprising: (i) a fusion protein; and (ii) a gRNA; or (iii) a crRNA and a tracrRNA; wherein the gRNA or the crRNA comprises a sequence complementary to a target mRNA.

[0014] In some embodiments, a method for post-transcriptionally regulating gene expression, the method comprising contacting a target mRNA with a fusion protein, wherein the guide nucleotide sequence-programmable RNA binding protein binds a gRNA or a crRNA that hybridizes to a region of the target RNA.

[0015] In one aspect, a fusion RNA comprising: (i) a guide nucleotide sequence-programmable RNA; and (ii) one or more internal ribosome entry sites (IRES). In some embodiments, the guide nucleotide sequence-programmable RNA is a guide RNA (gRNA) or a crisprRNA (crRNA). In some embodiments, the guide nucleotide sequence-programmable RNA is derived from a guide RNA scaffold from Steptococcus pyogenes, Staphylococcus aureus, Francisella novicida, Neisseria meningitidis, Streptococcus thermophilus, or Brevibacillus laterosporus. In some embodiments, the IRES is at least one of a Poliovirus IRES, Rhinovirus IRES, Encephalomyocarditis virus IRES (EMCV-IRES), Picornavirus IRES, Foot-and-mouth disease virus IRES (FMDV-IRES), Aphthovirus IRES, Kaposi's sarcoma-associated herpesvirus IRES (KSHV-IRES), Hepatitis A IRES, Hepatitis C IRES, Classical swine fever virus IRES, Pestivirus IRES, Bovine viral diarrhea virus IRES, Friend murine leukemia IRES, Moloney murine leukemia IRES (MMLV-IRES), Rous sarcoma virus IRES, Human immunodeficiency virus IRES (HIV-IRES), Plautia stali intestine virus IRES, Cripavirus IRES, Cricket paralysis virus IRES, Triatoma virus IRES, Rhopalosiphum padi virus IRES, Marek's disease virus IRES, Fibroblast growth factor (FGF-1 IRES and FGF-2 IRES), Platelet-derived growth factor B (PDGF/c-sis IRES), Vascular endothelial growth factor (VEGF IRES), and an Insulin-like growth factor 2 (IGF-II IRES).

[0016] In some embodiments, a method for post-transcriptionally regulating gene expression, the method comprising contacting a target mRNA with a fusion RNA and a guide nucleotide sequence-programmable RNA binding protein.

[0017] Unless otherwise defined, all technical and scientific terms used herein have the same meaning as commonly understood by one of ordinary skill in the art to which this invention belongs. Methods and materials are described herein for use in the present invention; other, suitable methods and materials known in the art can also be used. The materials, methods, and examples are illustrative only and not intended to be limiting. All publications, patent applications, patents, sequences, database entries, and other references mentioned herein are incorporated by reference in their entirety. In case of conflict, the present specification, including definitions, will control.

### INCORPORATION BY REFERENCE

[0018] All publications, patents, and patent applications mentioned in this specification are herein incorporated by reference to the same extent as if each individual publication, patent, or patent application was specifically and individually indicated to be incorporated by reference. To the extent publications and patents or patent applications incorporated by reference contradict the disclosure contained in the specification, the specification is intended to supersede and/or take precedence over any such contradictory material.

### BRIEF DESCRIPTION OF THE DRAWINGS

[0019] The novel features of the disclosure are set forth with particularly in the appended claims.

[0020] A better understanding of the features and advantages can be obtained by reference to the following detailed description that sets forth illustrative embodiments and accompanying drawings (“Figure” and “FIG.” herein), of which:

[0021] FIG. 1 depicts a nuclease dead Cas9 (dCas9) fused to a modified EIF4E protein. The schematic shows dCas9-EIF4E targeting the 3′UTR of a representative target transcript mRNA. Modified EIF4E facilitates transcript circularization and the recruitment of EIF4G and ribosomal pre-initiation complexes.

[0022] FIG. 2 depicts dCas9 fused to a modified EIF4E-BP1. The schematic shows dCas9-EIF4E-BP1 targeting the 3′UTR of a representative target transcript. Modified EIF4E-BP1 facilitates transcript mRNA circularization, and prevents the disengagement of EIF4E-BP1 from EIF4E. Constitutive binding prevents the recruitment of EIF4G and ribosomal pre-initiation complexes.

[0023] FIGS. 3A-3C depict schematics of DNA constructs for (FIG. 3A) Effector and (FIG. 3B) Reporter constructs used for characterization studies. Cas9-EIF4E expression level is correlated to a co-expressed CFP fluorophore on the Effector. YFP and RFP are co-expressed from different promoters on the Reporter. However, only YFP messenger RNA carries a target site (LUC target site) that is complementary to the spacer of the single guide RNA (sgRNA). (FIG. 3C) Results: (i) Heatmap showing how the fold change in YFP/RFP ratio relate to Reporter (x-axis) and Effector (y-axis) DNA construct levels. Datapoints used for the heatmap represent the average fluorescence of single cells that fall within defined bins. (ii) Same data as presented in (i), but with YFP/RFP ratio plotted as third variable (z-axis). (iii) Residuals for datapoints used to generate heatmap.

[0024] FIGS. 4A-4C depict schematics of DNA constructs for (FIG. 4A) Effector and (FIG. 4B) Reporter constructs used for characterization studies. Cas9-EIF4E-BP1 expression level is correlated to a co-expressed CFP fluorophore on the Effector. YFP and RFP are coexpressed from different promoters on the Reporter. However, only YFP messenger RNA carries a target site (LUC target site) that is complementary to the spacer of the single guide RNA (sgRNA). (FIG. 4C) Results: (i) Heatmap showing how the fold change in YFP/RFP ratio relate to Reporter (x-axis) and Effector (y-axis) DNA construct levels. Datapoints used for the heatmap represent the average fluorescence of single cells that fall within defined bins. (ii) Same data as presented in (i), but with YFP/RFP ratio plotted as third variable (z-axis). (iii) Residuals for datapoints used to generate heatmap.

[0025] FIG. 5 depicts a schematic of an exemplary system for modulating target mRNA translation. IRES can be used to nucleate translation initiation factors on a target messenger RNA. CRISPR/Cas proteins co-localize IRES elements to target messenger RNAs when they are fused 3′ to the targeting guide. Type I and Type II IRES elements employ a scanning mechanism to find appropriate start codons (AUG=green rectangles). Structural features of IRES stabilize pre-initiation complex on start codons (AUG), thus initiating translation in trans.

[0026] FIGS. 6A-6C show design of exemplary effector and reporter systems to test IRES activity in trans for dCas9 and dCas13b. Schematic of DNA constructs used to characterize regulation by (FIG. 6A) dCas9 and (FIG. 6B) dCas13b. Shown are exemplary (i) Effector and (ii) Reporter constructs for each CRISPR/Cas system. dCas expression level is correlated to a co-expressed CFP fluorophore on the Effector. YFP and RFP are co-expressed from different promoters on the Reporter. However, only YFP messenger RNA is targeted for post-transcriptional regulation. As a result, post-transcriptional regulation can be measured as changes in YFP expression relative to RFP expression. (FIG. 6C) Translation may prefer specific start codons (green boxes) which are found on any of three potential reading frames (+0, +1, +2). Expression from +0 reading frame: FLAG peptide expression can be profiled using ELISA or mass spectrometry. Expression from +1 reading frame: C-terminal HA tag labels all translated protein isoforms, and can be profiled using Western blot. Expression from +2 reading frame: No specific method to monitor expression of this frame. Below are the locations targeted by CRISPR guides (20nt width for dCas9, 30nt width for dCas13b).

[0027] FIGS. 7A-7B show Cas9-mediated translational initiation in trans using EMCV IRES to enhance protein production. (FIG. 7A) Location of spacers targeted by dCas9, which are used to profile changes in the expression of a 30.5 kDa protein product. (FIG. 7B) Using densitometry calculations via Western blot, changes in HA-tag signal vs. Cherry signal after dCas9 targeting by each of the spacers are plotted relative to observations using a non-targeting (NT) sgRNA-IRES.

[0028] FIG. 8 depicts transgene expression reporter constructs. RCas9 is expressed from a tetracycline responsive element (TRE) reporter. A constitutive promoter drives a polycistronic transcript containing puromycin N-acetyl transferase (Puro) and the reverse tetracycline (tet)-controlled transactivator (rtTA) separated by a P2A self-cleaving peptide, as well as CFP fused to a nuclear localization signal (NLS) preceded by an internal ribosome entry site (IRES). A second construct drives rCas9 fused to UBAP2L in the same plasmid background. rCas9 and rCas9-UBAP2L constructs were integrated into the genome at random copy number to establish stably-expressing lines. A third reporter construct harbors a U6 promoter driven single guide (sg)RNA targeting the indicated sites in the YFP reporter, which contains a YFP fused to histone H2B driven by a tet-inducible promoter, and NLS-fused RFP driving by the EF1α promoter.

[0029] FIG. 9 depicts quantitative fluorescence-activated cell sorting (FACS)-based reporter assay of the reporters transiently transfected into rCas9-UBAP2L expressing cells, normalized to rCas9 expressing cells, on each targeting site. Error bars denote standard deviation (SD) from n=2,000 rCas9-UBAP2L and n=2,000 rCas9 expressing cells per site.

### DETAILED DESCRIPTION

[0030] Embodiments according to the present disclosure will be described more fully hereinafter. Aspects of the disclosure may, however, be embodied in different forms and should not be construed as limited to the embodiments set forth herein. Rather, these embodiments are provided so that this disclosure will be thorough and complete, and will fully convey the scope of the invention to those skilled in the art. The terminology used in the description herein is for the purpose of describing particular embodiments only and is not intended to be limiting.

[0031] Unless otherwise defined, all terms (including technical and scientific terms) used herein have the same meaning as commonly understood by one of ordinary skill in the art to which this invention belongs. It will be further understood that terms, such as those defined in commonly used dictionaries, should be interpreted as having a meaning that is consistent with their meaning in the context of the present application and relevant art and should not be interpreted in an idealized or overly formal sense unless expressly so defined herein. While not explicitly defined below, such terms should be interpreted according to their common meaning.

[0032] Unless the context indicates otherwise, it is specifically intended that the various features of the invention described herein can be used in any combination. Moreover, the disclosure also contemplates that in some embodiments, any feature or combination of features set forth herein can be excluded or omitted. To illustrate, if the specification states that a complex comprises components A, B and C, it is specifically intended that any of A, B or C, or a combination thereof, can be omitted and disclaimed singularly or in any combination.

[0033] Unless explicitly indicated otherwise, all specified embodiments, features, and terms intend to include both the recited embodiment, feature, or term and biological equivalents thereof.

[0034] All numerical designations, e.g., pH, temperature, time, concentration, and molecular weight, including ranges, are approximations which are varied (+) or (−) by increments of 1.0 or 0.1, as appropriate, or alternatively by a variation of +/−15%, or alternatively 10%, or alternatively 5%, or alternatively 2%. It is to be understood, although not always explicitly stated, that all numerical designations are preceded by the term “about”. It also is to be understood, although not always explicitly stated, that the reagents described herein are merely exemplary and that equivalents of such are known in the art.

### Definitions

[0035] As used in the description of the invention and the appended claims, the singular forms “a,” “an” and “the” are intended to include the plural forms as well, unless the context clearly indicates otherwise.

[0036] The term “about,” as used herein when referring to a measurable value such as an amount or concentration and the like, is meant to encompass variations of 20%, 10%, 5%, 1%, 0.5%, or even 0.1% of the specified amount.

[0037] The terms or “acceptable,” “effective,” or “sufficient” when used to describe the selection of any components, ranges, dose forms, etc. disclosed herein intend that said component, range, dose form, etc. is suitable for the disclosed purpose.

[0038] The term “adeno-associated virus” or “AAV” as used herein refers to a member of the class of viruses associated with this name and belonging to the genus dependoparvovirus, family Parvoviridae. Multiple serotypes of this virus are known to be suitable for gene delivery; all known serotypes can infect cells from various tissue types. At least 11 or 12, sequentially numbered, are disclosed in the prior art. Non-limiting exemplary serotypes useful in the methods disclosed herein include any of the 11 or 12 serotypes, e.g., AAV2, AAV5, and AAV8, or variant serotypes, e.g. AAV-DJ. The AAV structural particle is composed of 60 protein molecules made up of VP1, VP2, and VP3. Each particle contains approximately 5 VP1 proteins, 5 VP2 proteins and 50 VP3 proteins ordered into an icosahedral structure.

[0039] As used herein, the “administration” of an agent (e.g., a fusion RNA, viral particle, vector, polynucleotide, cell, population of cells, composition, or pharmaceutical composition) to a subject includes any route of introducing or delivering to a subject the agent to perform its intended function. Administration can be carried out by any suitable route, including orally, intranasally, intraocularly, ophthalmically, parenterally (intravenously, intramuscularly, intraperitoneally, or subcutaneously), or topically. Administration includes self-administration and the administration by another.

[0040] Also as used herein, “and/or” refers to and encompasses any and all possible combinations of one or more of the associated listed items, as well as the lack of combinations when interpreted in the alternative (“or”).

[0041] The term “guide nucleotide sequence-programmable RNA” refers to a CRISPR-associated RNA comprising a sequence that is complementary and/or homologous to a target nucleic acid. Non-limiting examples of guide nucleotide sequence-programmable RNAs include single guide RNA (sgRNA) and crRNA, and biological equivalents thereof. In some embodiments, the guide nucleotide sequence-programmable RNA is synthetic. In some embodiments, a “scaffold” RNA refers to a guide nucleotide sequence-programmable RNA wherein the sequence that is complementary and/or homologous to a target nucleic acid in the fusion RNA can be modified.

[0042] Guide RNAs (gRNAs) of the disclosure may comprise a spacer sequence and a scaffolding sequence. In some embodiments, a guide RNA is a single guide RNA (sgRNA) comprising a contiguous spacer sequence and scaffolding sequence. The terms guide RNA (gRNA) and single guide RNA (sgRNA) are used interchangeably throughout the disclosure. In some embodiments, the spacer sequence and the scaffolding sequence are not contiguous. In some embodiments, a scaffold sequence comprises a “direct repeat” (DR) sequence. DR sequences refer to the repetitive sequences in the CRISPR locus (naturally-occurring in a bacterial genome or plasmid) that are interspersed with the spacer sequences. It is well known that one would be able to infer the DR sequence of a corresponding Cas protein if the sequence of the associated CRISPR locus is known. In some embodiments, a sequence encoding a guide RNA or single guide RNA of the disclosure comprises or consists of a spacer sequence and a scaffolding sequence, that are separated by a linker sequence. In some embodiments, the linker sequence may comprise or consist of 1, 2, 3, 4, 5, 6, 7, 8, 9, 10, 15, 20, 25, 30, 35, 40, 45, 50, or any number of nucleotides in between. In some embodiments, the linker sequence may comprise at least 1, 2, 3, 4, 5, 6, 7, 8, 9, 10, 15, 20, 25, 30, 35, 40, 45, 50, or any number of nucleotides in between.

[0043] Guide RNAs (gRNAs) of the disclosure may comprise non-naturally occurring nucleotides. In some embodiments, a guide RNA of the disclosure or a sequence encoding the guide RNA comprises or consists of modified or synthetic RNA nucleotides. Exemplary modified RNA nucleotides include, but are not limited to, pseudouridine (Ψ), dihydrouridine (D), inosine (I), and 7-methylguanosine (m7G), hypoxanthine, xanthine, xanthosine, 7-methylguanine, 5, 6-Dihydrouracil, 5-methylcytosine, 5-methylcytidine, 5-hydropxymethylcytosine, isoguanine, and isocytosine.

[0044] Guide RNAs (gRNAs) of the disclosure may bind modified RNA within a target sequence. Within a target sequence, guide RNAs (gRNAs) of the disclosure may bind modified RNA. Exemplary epigenetically or post-transcriptionally modified RNA include, but are not limited to, 2′-O-Methylation (2′-OMe) (2′-O-methylation occurs on the oxygen of the free 2′-OH of the ribose moiety), N6-methyladenosine (m6A), and 5-methylcytosine (m5C).

[0045] In some embodiments of the compositions of the disclosure, a guide RNA of the disclosure comprises at least one sequence encoding a non-coding C/D box small nucleolar RNA (snoRNA) sequence. In some embodiments, the snoRNA sequence comprises at least one sequence that is complementary to the target RNA, wherein the target sequence of the RNA molecule comprises at least one 2′-OMe. In some embodiments, the snoRNA sequence comprises at least one sequence that is complementary to the target RNA, wherein the at least one sequence that is complementary to the target RNA comprises a box C motif (RUGAUGA) and a box D motif (CUGA).

[0046] Spacer sequences of the disclosure bind to the target sequence of an RNA molecule. Spacer sequences of the disclosure may comprise a CRISPR RNA (crRNA). Spacer sequences of the disclosure comprise or consist of a sequence having sufficient complementarity to a target sequence of an RNA molecule to bind selectively to the target sequence. Upon binding to a target sequence of an RNA molecule, the spacer sequence may guide one or more of a scaffolding sequence and a fusion protein to the RNA molecule. In some embodiments, a sequence having sufficient complementarity to a target sequence of an RNA molecule to bind selectively to the target sequence has at least 50%, 55%, 60%, 65%, 70%, 75%, 80%, 85%, 90%, 95%, 96, 97%, 98%, 99%, or any percentage identity in between to the target sequence. In some embodiments, a sequence having sufficient complementarity to a target sequence of an RNA molecule to bind selectively to the target sequence has 100% identity the target sequence. Scaffolding sequences of the disclosure bind the RNA-binding protein of the disclosure.

[0047] Scaffolding sequences of the disclosure may comprise a trans acting RNA (tracrRNA). Scaffolding sequences of the disclosure comprise or consist of a sequence having sufficient complementarity to a target sequence of an RNA molecule to bind selectively to the target sequence. Upon binding to a target sequence of an RNA molecule, the scaffolding sequence may guide a fusion protein to the RNA molecule. In some embodiments, a sequence having sufficient complementarity to a target sequence of an RNA molecule to bind selectively to the target sequence has at least 50%, 55%, 60%, 65%, 70%, 75%, 80%, 85%, 90%, 95%, 96, 97%, 98%, 99%, or any percentage identity in between to the target sequence. In some embodiments, a sequence having sufficient complementarity to a target sequence of an RNA molecule to bind selectively to the target sequence has 100% identity the target sequence. Alternatively or in addition, in some embodiments, scaffolding sequences of the disclosure comprise or consist of a sequence that binds to a first RNA binding protein or a second RNA binding protein of a fusion protein of the disclosure. In some embodiments, scaffolding sequences of the disclosure comprise a secondary structure or a tertiary structure. Exemplary secondary structures include, but are not limited to, a helix, a stem loop, a bulge, a tetraloop and a pseudoknot. Exemplary tertiary structures include, but are not limited to, an A-form of a helix, a B-form of a helix, and a Z-form of a helix. Exemplary tertiary structures include, but are not limited to, a twisted or helicized stem loop. Exemplary tertiary structures include, but are not limited to, a twisted or helicized pseudoknot. In some embodiments, scaffolding sequences of the disclosure comprise at least one secondary structure or at least one tertiary structure. In some embodiments, scaffolding sequences of the disclosure comprise one or more secondary structure(s) or one or more tertiary structure(s).

[0048] In some embodiments of the compositions of the disclosure, a guide RNA or a portion thereof selectively binds to a tetraloop motif in an RNA molecule of the disclosure. In some embodiments, a target sequence of an RNA molecule comprises a tetraloop motif. In some embodiments, the tetraloop motif is a “GRNA” motif comprising or consisting of one or more of the sequences of GAAA, GUGA, GCAA or GAGA.

[0049] In some embodiments of the compositions of the disclosure, a guide RNA or a portion thereof that binds to a target sequence of an RNA molecule hybridizes to the target sequence of the RNA molecule. In some embodiments, a guide RNA or a portion thereof that binds to a first RNA binding protein or to a second RNA binding protein covalently binds to the first RNA binding protein or to the second RNA binding protein. In some embodiments, a guide RNA or a portion thereof that binds to a first RNA binding protein or to a second RNA binding protein non-covalently binds to the first RNA binding protein or to the second RNA binding protein.

[0050] In some embodiments of the compositions of the disclosure, a guide RNA or a portion thereof comprises or consists of between 10 and 100 nucleotides, inclusive of the endpoints. In some embodiments, a spacer sequence of the disclosure comprises or consists of between 10 and 30 nucleotides, inclusive of the endpoints. In some embodiments, a spacer sequence of the disclosure comprises or consists of 15, 16, 17, 18, 19, 20, 21, 22, 23, 24, 25, 26, 27, 28, 29, or 30 nucleotides. In some embodiments, the spacer sequence of the disclosure comprises or consists of 20 nucleotides. In some embodiments, the spacer sequence of the disclosure comprises or consists of 21 nucleotides. In some embodiments, a scaffold sequence of the disclosure comprises or consists of between 10 and 100 nucleotides, inclusive of the endpoints. In some embodiments, a scaffold sequence of the disclosure comprises or consists of 30, 35, 40, 45, 50, 55, 60, 65, 70, 76, 80, 87, 90, 95, 100, or any number of nucleotides in between. In some embodiments, the scaffold sequence of the disclosure comprises or consists of between 85 and 95 nucleotides, inclusive of the endpoints. In some embodiments, the scaffold sequence of the disclosure comprises or consists of 85 nucleotides. In some embodiments, the scaffold sequence of the disclosure comprises or consists of 90 nucleotides. In some embodiments, the scaffold sequence of the disclosure comprises or consists of 93 nucleotides.

[0051] In some embodiments of the compositions of the disclosure, a guide RNA or a portion thereof does not comprise a nuclear localization sequence (NLS).

[0052] In some embodiments of the compositions of the disclosure, a guide RNA, or a portion thereof does not comprise a sequence complementary to a protospacer adjacent motif (PAM).

[0053] In some embodiments, therapeutic or pharmaceutical compositions of the disclosure do not comprise a PAMmer oligonucleotide. In other embodiments, optionally, non-therapeutic or non-pharmaceutical compositions may comprise a PAMmer oligonucleotide.

[0054] In some embodiments of the compositions of the disclosure, a guide RNA or a portion thereof comprises a sequence complementary to a protospacer flanking sequence (PFS). In some embodiments, including those wherein a guide RNA or a portion thereof comprises a sequence complementary to a PFS, the RNA binding protein may comprise a sequence isolated or derived from a Cas protein, such as, without limitation, a Cas9, Cas13b, or Cas13d protein. In some embodiments, including those wherein a guide RNA or a portion thereof comprises a sequence complementary to a PFS, the RNA binding protein may comprise a sequence encoding a Cas protein, such as, without limitation, a Cas9, Cas13b, or Cas13d protein, or an RNA-binding portion thereof. In some embodiments, the guide RNA or a portion thereof does not comprise a sequence complementary to a PFS.

[0055] In some embodiments, a sequence encoding a guide RNA of the disclosure further comprises a sequence encoding a promoter to drive expression of the guide RNA. In some embodiments, a vector comprising a sequence encoding a guide RNA of the disclosure further comprises a sequence encoding a promoter to drive expression of the guide RNA. In some embodiments, a sequence encoding a promoter to drive expression of the guide RNA comprises a sequence encoding a constitutive promoter. In some embodiments, a sequence encoding a promoter to drive expression of the guide RNA comprises a sequence encoding an inducible promoter. In some embodiments, a sequence encoding a promoter to drive expression of the guide RNA comprises a sequence encoding a hybrid or a recombinant promoter. In some embodiments, a sequence encoding a promoter to drive expression of the guide RNA comprises a sequence encoding a promoter capable of expressing the guide RNA in a mammalian cell. In some embodiments, a sequence encoding a promoter to drive expression of the guide RNA comprises a sequence encoding a promoter capable of expressing the guide RNA in a human cell. In some embodiments, a sequence encoding a promoter to drive expression of the guide RNA comprises a sequence encoding a promoter capable of expressing the guide RNA and restricting the guide RNA to the nucleus of the cell. In some embodiments, a sequence encoding a promoter to drive expression of the guide RNA comprises a sequence encoding a human RNA polymerase promoter or a sequence isolated or derived from a sequence encoding a human RNA polymerase promoter. In some embodiments, a sequence encoding a promoter to drive expression of the guide RNA comprises a sequence encoding a U6 promoter or a sequence isolated or derived from a sequence encoding a U6 promoter. In some embodiments, a sequence encoding a promoter to drive expression of the guide RNA comprises a sequence encoding a human tRNA promoter or a sequence isolated or derived from a sequence encoding a human tRNA promoter. In some embodiments, a sequence encoding a promoter to drive expression of the guide RNA comprises a sequence encoding a human valine tRNA promoter or a sequence isolated or derived from a sequence encoding a human valine tRNA promoter.

[0056] In some embodiments of the compositions of the disclosure, a sequence encoding a promoter to drive expression of the guide RNA further comprises a regulatory element. In some embodiments, a vector comprising a sequence encoding a promoter to drive expression of the guide RNA further comprises a regulatory element. In some embodiments, a regulatory element enhances expression of the guide RNA. Exemplary regulatory elements include, but are not limited to, an enhancer element, an intron, an exon, or a combination thereof.

[0057] In some embodiments of the compositions of the disclosure, a vector of the disclosure comprises one or more of a sequence encoding a guide RNA, a sequence encoding a promoter to drive expression of the guide RNA and a sequence encoding a regulatory element. In some embodiments of the compositions of the disclosure, the vector further comprises a sequence encoding a fusion protein of the disclosure.

[0058] The term “guide nucleotide sequence-programmable RNA binding protein” refers to a CRISPR-associated, RNA-guided endonuclease such as, without limitation, Type II CRISPR Cas proteins such as, e.g., streptococcus pyogenes Cas9 (spCas9) and orthologs and biological equivalents thereof. Exemplary Cas9 proteins of the disclosure may be isolated or derived from any species, including, but not limited to, a bacteria or an archaea. Exemplary Cas9 proteins of the disclosure may be isolated or derived from any species, including, but not limited to, Streptococcus pyogenes, Haloferax mediteranii, Mycobacterium tuberculosis, Francisella tularensis subsp. novicida, Pasteurella multocida, Neisseria meningitidis, Campylobacter jejune, Streptococcus thermophilus, Campylobacter lari CF89-12, Mycoplasma gallisepticum str. F, Nitratifractor salsuginis str. DSM 16511, Parvibaculum lavamentivorans, Roseburia intestinalis, Neisseria cinerea, a Gluconacetobacter diazotrophicus, an Azospirillum B510, a Sphaerochaeta globus str. Buddy, Flavobacterium columnare, Fluviicola taffensis, Bacteroides coprophilus, Mycoplasma mobile, Lactobacillus farciminis, Streptococcus pasteurianus, Lactobacillus johnsonii, Staphylococcus pseudintermedius, Filifactor alocis, Treponema denticola, Legionella pneumophila str. Paris, Sutterella wadsworthensis, Corynebacter diphtherias, Streptococcus aureus, and Francisella novicida.

[0059] Biological equivalents of Cas9 include but are not limited to Type V systems such as a Cpfl protein, and Type VI CRISPR systems, such as Cas13a, C2c2, Cas13b, CasRx, Cas13d, and CasM which target RNA rather than DNA. A guide nucleotide sequence-programmable RNA binding protein may refer to an endonuclease that causes breaks or nicks in RNA as well as other variations such as nuclease-inactive Cas proteins such as, e.g., dead Cas9 or dCas9, which lack endonuclease activity. A guide nucleotide sequence-programmable RNA binding protein may also refer to a “split” protein in which the protein is split into two halves (e.g., C-Cas9 and N-Cas9) and fused with two intein moieties. See, e.g., U.S. Pat. No. 9,074,199 B1; Zetsche et al. (2015) Nat Biotechnol. 33(2):139-42; Wright et al. (2015) PNAS 112(10) 2984-89.

[0060] In particular embodiments, the guide nucleotide sequence-programmable RNA binding protein is modified to eliminate endonuclease activity (“nuclease dead”). For example, both RuvC and HNH nuclease domains can be rendered inactive by point mutations (e.g., D10A and H840A in SpCas9), resulting in a nuclease dead Cas9 (dCas9) molecule that cannot cleave target DNA. The dCas9 molecule retains the ability to bind to target RNA based on the gRNA targeting sequence.

[0061] Further non-limiting examples of orthologs and biological equivalents Cas9 are provided in Table 1.

TABLE 1

| Name | Protein Sequence |
|---|---|
| S. pyogenes | MDKKYSIGLDIGTNSVGWAV |
| Cas9 | ITDEYKVPSKKFKVLGNTDR |
| | HSIKKNLIGALLFDSGETAE |
| | ATRLKRTARRRYTRRKNRIC |
| | YLQEIFSNEMAKVDDSFFHR |
| | LEESFLVEEDKKHERHPIFG |
| | NIVDEVAYHEKYPTIYHLRK |
| | KLVDSTDKADLRLIYLALAH |
| | MIKFRGHFLIEGDLNPDNSD |
| | VDKLFIQLVQTYNQLFEENP |
| | INASGVDAKAILSARLSKSR |
| | RLENLIAQLPGEKKNGLFGN |
| | LIALSLGLTPNFKSNFDLAE |
| | DAKLQLSKDTYDDDLDNLLA |
| | QIGDQYADLFLAAKNLSDAI |
| | LLSDILRVNTEITKAPLSAS |
| | MIKRYDEHHQDLTLLKALVR |
| | QQLPEKYKEIFFDQSKNGYA |
| | GYIDGGASQEEFYKFIKPIL |
| | EKMDGTEELLVKLNREDLLR |
| | KQRTFDNGSIPHQIHLGELH |
| | AILRRQEDFYPFLKDNREKI |
| | EKILTFRIPYYVGPLARGNS |
| | RFAWMTRKSEETITPWNFEE |
| | VVDKGASAQSFIERMTNFDK |
| | NLPNEKVLPKHSLLYEYFTV |
| | YNELTKVKYVTEGMRKPAFL |
| | SGEQKKAIVDLLFKTNRKVT |
| | VKQLKEDYFKKIECFDSVEI |
| | SGVEDRFNASLGTYHDLLKI |
| | IKDKDFLDNEENEDILEDIV |
| | LTLTLFEDREMIEERLKTYA |
| | HLFDDKVMKQLKRRRYTGWG |
| | RLSRKLINGIRDKQSGKTIL |
| | DFLKSDGFANRNFMQLIHDD |
| | SLTFKEDIQKAQVSGQGDSL |
| | HEHIANLAGSPAIKKGILQT |
| | VKVVDELVKVMGRHKPENIV |
| | IEMARENQTTQKGQKNSRER |
| | MKRIEEGIKELGSQILKEHP |
| | VENTQLQNEKLYLYYLQNGR |
| | DMYVDQELDINRLSDYDVDH |
| | IVPQSFLKDDSIDNKVLTRS |
| | DKNRGKSDNVPSEEVVKKMK |
| | NYWRQLLNAKLITQRKFDNL |
| | TKAERGGLSELDKAGFIKRQ |
| | LVETRQITKHVAQILDSRMN |
| | TKYDENDKLIREVKVITLKS |
| | KLVSDFRKDFQFYKVREINN |
| | YHHAHDAYLNAVVGTALIKK |
| | YPKLESEFVYGDYKVYDVRK |
| | MIAKSEQEIGKATAKYFFYS |
| | NIMNFFKTEITLANGEIRKR |
| | PLIETNGETGEIVWDKGRDF |
| | ATVRKVLSMPQVNIVKKIEV |
| | QTGGFSKESILPKRNSDKLI |
| | ARKKDWDPKKYGGFDSPTVA |
| | YSVLVVAKVEKGKSKKLKSV |
| | KELLGITIMERSSFEKNPID |
| | FLEAKGYKEVKKDLIIKLPK |
| | YSLFELENGRKRMLASAGEL |
| | QKGNELALPSKYVNFLYLAS |
| | HYEKLKGSPEDNEQKQLFVE |
| | QHKHYLDEIIEQISEFSKRV |
| | ILADANLDKVLSAYNKHRDK |
| | PIREQAENIIHLFTLTNLGA |
| | PAAFKYFDTTIDRKRYTSTK |
| | EVLDATLIHQSITGLYETRI |
| | DLSQLGGD |
| | (SEQ ID NO: 1) |
| Staphylococcus | MKRNYILGLDIGITSVGYGI |
| aureus Cas9 | IDYETRDVIDAGVRLFKEAN |
| | VENNEGRRSKRGARRLKRRR |
| | RHRIQRVKKLLFDYNLLTDH |
| | SELSGINPYEARVKGLSQKL |
| | SEEEFSAALLHLAKRRGVHN |
| | VNEVEEDTGNELSTKEQISR |
| | NSKALEEKYVAELQLERLKK |
| | DGEVRGSINRFKTSDYVKEA |
| | KQLLKVQKAYHQLDQSFIDT |
| | YIDLLETRRTYYEGPGEGSP |
| | FGWKDIKEWYEMLMGHCTYF |
| | PEELRSVKYAYNADLYNALN |
| | DLNNLVITRDENEKLEYYEK |
| | FQIIENVFKQKKKPTLKQIA |
| | KEILVNEEDIKGYRVTSTGK |
| | PEFTNLKVYHDIKDITARKE |
| | IIENAELLDQIAKILTIYQS |
| | SEDIQEELTNLNSELTQEEI |
| | EQISNLKGYTGTHNLSLKAI |
| | NLILDELWHTNDNQIAIFNR |
| | LKLVPKKVDLSQQKEIPTTL |
| | VDDFILSPVVKRSFIQSIKV |
| | INAIIKKYGLPNDIIIELAR |
| | EKNSKDAQKMINEMQKRNRQ |
| | TNERIEEIIRTTGKENAKYL |
| | IEKIKLHDMQEGKCLYSLEA |
| | IPLEDLLNNPFNYEVDHIIP |
| | RSVSFDNSFNNKVLVKQEEN |
| | SKKGNRTPFQYLSSSDSKIS |
| | YETFKKHILNLAKGKGRISK |
| | TKKEYLLEERDINRFSVQKD |
| | FINRNLVDTRYATRGLMNLL |
| | RSYFRVNNLDVKVKSINGGF |
| | TSFLRRKWKFKKERNKGYKH |
| | HAEDALIIANADFIFKEWKK |
| | LDKAKKVMENQMIEEKQAES |
| | MPEIEIEQEYKEIFITPHQI |
| | KHIKDFKDYKYSHRVDKKPN |
| | RELINDTLYSTRKDDKGNTL |
| | IVNNLNGLYDKDNDKLKKLI |
| | NKSPEKLLMYHHDPQTYQKL |
| | KLIMEQYGDEKNPLYKYYEE |
| | TGNYLTKYSKKDNGPVIKKI |
| | KYYGNKLNAHLDITDDYPNS |
| | RNKVVKLSLKPYRFDVYLDN |
| | GVYKFVTVKNLDVIKKENYY |
| | EVNSKCYEEAKKLKKISNQA |
| | EFIASFYNNDLIKINGELYR |
| | VIGVNNDLLNRIEVNMIDIT |
| | YREYLENMNDKRPPRIIKTI |
| | ASKTQSIKKYSTDILGNLYE |
| | VKSKKHPQIIKKG |
| | (SEQ ID NO: 2) |
| S. thermophilus | MSDLVLGLDIGIGSVGVGIL |
| CRISPR 1 | NKVTGEIIHKNSRIFPAAQA |
| Cas9 | ENNLVRRTNRQGRRLARRKK |
| | HRRVRLNRLFEESGLITDFT |
| | KISINLNPYQLRVKGLTDEL |
| | SNEELFIALKNMVKHRGISY |
| | LDDASDDGNSSVGDYAQIVK |
| | ENSKQLETKTPGQIQLERYQ |
| | TYGQLRGDFTVEKDGKKHRL |
| | INVFPTSAYRSEALRILQTQ |
| | QEFNPQITDEFINRYLEILT |
| | GKRKYYHGPGNEKSRTDYGR |
| | YRTSGETLDNIFGILIGKCT |
| | FYPDEFRAAKASYTAQEFNL |
| | LNDLNNLTVPTETKKLSKEQ |
| | KNQIINYVKNEKAMGPAKLF |
| | KYIAKLLSCDVADIKGYRID |
| | KSGKAEIHTFEAYRKMKTLE |
| | TLDIEQMDRETLDKLAYVLT |
| | LNIEREGIQEALEHEFADGS |
| | FSQKQVDELVQFRKANSSIF |
| | GKGWHNFSVKLMMELIPELY |
| | ETSEEQMTILTRLGKQKTTS |
| | SSNKTKYIDEKLLIEEIYNP |
| | VVAKSVRQAIKIVNAAIKEY |
| | GDFDNIVIEMARETNEDDEK |
| | KAIQKIQKANKDEKDAAMLK |
| | AANQYNGKAELPHSVFHGHK |
| | QLATKIRLWHQQGERCLYTG |
| | KTISIHDLINNSNQFEVDHI |
| | LPLSITFDDSLANKVLVYAT |
| | ANQEKGQRTPYQALDSMDDA |
| | WSFRELKAFVRESKTLSNKK |
| | KEYLLIEEDISKFDVRKKFI |
| | ERNLVDTRYASRVVLNALQE |
| | HFRAHKIDTKVSVVRGQFTS |
| | QLRRHWGIEKTRDTYHHHAV |
| | DALIIAASSQLNLWKKQKNT |
| | LVSYSEDQLLDIETGELISD |
| | DEYKESVFKAPYQHFVDTLK |
| | SKEFEDSILFSYQVDSKFNR |
| | KISDATIYATRQAKVGKDKA |
| | DETYVLGKIKDIYTQDGYDA |
| | FMKIYKKDKSKFLMYRHDPQ |
| | TFEKVIEPILENYPNKQIND |
| | KGKEVPCNPFLKYKEEHGYI |
| | RKYSKKGNGPEIKSLKYYDS |
| | KLGNHIDITPKDSNNKVVLQ |
| | SVSPWRADVYFNKTTGKYEI |
| | LGLKYADLQFDKGTGTYKIS |
| | QEKYNDIKKKEGVDSDSEFK |
| | FTLYKNDLLLVKDTETKEQQ |
| | LFRFLSRTMPKQKHYVELKP |
| | YDKQKFEGGEALIKVLGNVA |
| | NSGQCKKGLGKSNISIYKVR |
| | TDVLGNQHIIKNEGDKPKLD |
| | F |
| | (SEQ ID NO: 3) |
| N. meningitidis | MAAFKPNPINYILGLDIGIA |
| Cas9 | SVGWAMVEIDEDENPICLID |
| | LGVRVFERAEVPKTGDSLAM |
| | ARRLARSVRRLTRRRAHRLL |
| | RARRLLKREGVLQAADFDEN |
| | GLIKSLPNTPWQLRAAALDR |
| | KLTPLEWSAVLLHLIKHRGY |
| | LSQRKNEGETADKELGALLK |
| | GVADNAHALQTGDFRTPAEL |
| | ALNKFEKESGHIRNQRGDYS |
| | HTFSRKDLQAELILLFEKQK |
| | EFGNPHVSGGLKEGIETLLM |
| | TQRPALSGDAVQKMLGHCTF |
| | EPAEPKAAKNTYTAERFIWL |
| | TKLNNLRILEQGSERPLTDI |
| | ERATLMDEPYRKSKLTYAQA |
| | RKLLGLEDTAFFKGLRYGKD |
| | NAEASTLMEMKAYHAISRAL |
| | EKEGLKDKKSPLNLSPELQD |
| | EIGTAFSLFKTDEDITGRLK |
| | DRIQPEILEALLKHISFDKF |
| | VQISLKALRRIVPLMEQGKR |
| | YDEACAEIYGDHYGKKNIEE |
| | KIYLPPIPADEIRNPVVLRA |
| | LSQARKVINGVVRRYGSPAR |
| | IHIETAREVGKSFKDRKEIE |
| | KRQEENRKDREKAAAKFREY |
| | FPNFVGEPKSKDILKLRLYE |
| | QQHGKCLYSGKEINLGRLNE |
| | KGYVEIDHALPFSRTWDDSF |
| | NNKVLVLGSENQNKGNQTPY |
| | EYFNGKDNSREWQEFKARVE |
| | TSRFPRSKKQRILLQKFDED |
| | GFKERNLNDTRYVNRFLCQF |
| | VADRMRLTGKGKKRVFASNG |
| | QITNLLRGFWGLRKVRAEND |
| | RHHALDAVVVACSTVAMQQK |
| | ITRFVRYKEMNAFDGKTIDK |
| | ETGEVLHQKTHFPQPWEFFA |
| | QEVMIRVFGKPDGKPEFEEA |
| | DTPEKLRTLLAEKLSSRPEA |
| | VHEYVTPLFVSRAPNRKMSG |
| | QGHMETVKSAKRLDEGVSVL |
| | RVPLTQLKLKDLEKMVNRER |
| | EPKLYEALKARLEAHKDDPA |
| | KAFAEPFYKYDKAGNRTQQV |
| | KAVRVEQVQKTGVWVRNHNG |
| | IADNATMVRVDVFEKGDKYY |
| | LVPIYSWQVAKGILPDRAVV |
| | QGKDEEDWQLIDDSFNFKFS |
| | LHPNDLVEVITKKARMFGYF |
| | ASCHRGTGNINIRIHDLDHK |
| | IGKNGILEGIGVKTALSFQK |
| | YQIDELGKEIRPCRLKKRPP |
| | VR (SEQ ID NO: 4) |
| Parvibaculum | MERIFGFDIGTTSIGFSVID |
| lavamentivorans | YSSTQSAGNIQRLGVRIFPE |
| Cas9 | ARDPDGTPLNQQRRQKRMMR |
| | RQLRRRRIRRKALNETLHEA |
| | GFLPAYGSADWPVVMADEPY |
| | ELRRRGLEEGLSAYEFGRAI |
| | YHLAQHRHFKGRELEESDTP |
| | DPDVDDEKEAANERAATLKA |
| | LKNEQTTLGAWLARRPPSDR |
| | KRGIHAHRNVVAEEFERLWE |
| | VQSKFHPALKSEEMRARISD |
| | TIFAQRPVFWRKNTLGECRF |
| | MPGEPLCPKGSWLSQQRRML |
| | EKLNNLAIAGGNARPLDAEE |
| | RDAILSKLQQQASMSWPGVR |
| | SALKALYKQRGEPGAEKSLK |
| | FNLELGGESKLLGNALEAKL |
| | ADMFGPDWPAHPRKQEIRHA |
| | VHERLWAADYGETPDKKRVI |
| | ILSEKDRKAHREAAANSFVA |
| | DFGITGEQAAQLQALKLPTG |
| | WEPYSIPALNLFLAELEKGE |
| | RFGALVNGPDWEGWRWINFP |
| | HRNQPTGEILDKLPSPASKE |
| | ERERISQLRNPTVVRTQNEL |
| | RKVVNNLIGLYGKPDRIRIE |
| | VGRDVGKSKREREEIQSGIR |
| | RNEKQRKKAIEDLIKNGIAN |
| | PSRDDVEKWILWKEGQERCP |
| | YTGDQIGFNALFREGRYEVE |
| | HIWPRSRSFDNSPRNKTLCR |
| | KDVNIEKGNRMPFEAFGHDE |
| | DRWSAIQIRLQGMVSAKGGT |
| | GMSPGKVKRFLAKTMPEDFA |
| | ARQLNDTRYAAKQILAQLKR |
| | LWPDMGPEAPVKVEAVTGQV |
| | TAQLRKLWTLNNILADDGEK |
| | TRADHRHHAIDALTVACTHP |
| | GMTNKLSRYWQLRDDPRAEK |
| | PALTPPWDTIRADAEKAVSE |
| | IVVSHRVRKKVSGPLHKETT |
| | YGDTGTDIKTKSGTYRQFVT |
| | RKKIESLSKGELDEIRDPRI |
| | KEIVAAHVAGRGGDPKKAFP |
| | PYPCVSPGGPEIRKVRLTSK |
| | QQLNLMAQTGNGYADLGSNH |
| | HIAIYRLPDGKADFEIVSLF |
| | DASRRLAQRNPIVQRTRADG |
| | ASFVMSLAAGEAIMIPEGSK |
| | KGIWIVQGVWASGQVVLERD |
| | TDADHSTTTRPMPNPILKDD |
| | AKKVSIDPIGRVRPSND |
| | (SEQ ID NO: 5) |
| Corynebacter | MKYHVGIDVGTFSVGLAAIE |
| diphtheria | VDDAGMPIKTLSLVSHIHDS |
| Cas9 | GLDPDEIKSAVTRLASSGIA |
| | RRTRRLYRRKRRRLQQLDKF |
| | IQRQGWPVIELEDYSDPLYP |
| | WKVRAELAASYIADEKERGE |
| | KLSVALRHIARHRGWRNPYA |
| | KVSSLYLPDGPSDAFKAIRE |
| | EIKRASGQPVPETATVGQMV |
| | TLCELGTLKLRGEGGVLSAR |
| | LQQSDYAREIQEICRMQEIG |
| | QELYRKIIDVVFAAESPKGS |
| | ASSRVGKDPLQPGKNRALKA |
| | SDAFQRYRIAALIGNLRVRV |
| | DGEKRILSVEEKNLVFDHLV |
| | NLTPKKEPEWVTIAEILGID |
| | RGQLIGTATMTDDGERAGAR |
| | PPTHDTNRSIVNSRIAPLVD |
| | WWKTASALEQHAMVKALSNA |
| | EVDDFDSPEGAKVQAFFADL |
| | DDDVHAKLDSLHLPVGRAAY |
| | SEDTLVRLTRRMLSDGVDLY |
| | TARLQEFGIEPSWTPPTPRI |
| | GEPVGNPAVDRVLKTVSRWL |
| | ESATKTWGAPERVIIEHVRE |
| | GFVTEKRAREMDGDMRRRAA |
| | RNAKLFQEMQEKLNVQGKPS |
| | RADLWRYQSVQRQNCQCAYC |
| | GSPITFSNSEMDHIVPRAGQ |
| | GSTNTRENLVAVCHRCNQSK |
| | GNTPFAIWAKNTSIEGVSVK |
| | EAVERTRHWVTDTGMRSTDF |
| | KKFTKAVVERFQRATMDEEI |
| | DARSMESVAWMANELRSRVA |
| | QHFASHGTTVRVYRGSLTAE |
| | ARRASGISGKLKFFDGVGKS |
| | RLDRRHHAIDAAVIAFTSDY |
| | VAETLAVRSNLKQSQAHRQE |
| | APQWREFTGKDAEHRAAWRV |
| | WCQKMEKLSALLIEDLRDDR |
| | VVVMSNVRLRLGNGSAHKET |
| | IGKLSKVKLSSQLSVSDIDK |
| | ASSEALWCALTREPGFDPKE |
| | GLPANPERHIRVNGTHVYAG |
| | DNIGLFPVSAGSIALRGGYA |
| | ELGSSFHHARVYKITSGKKP |
| | AFAMLRVYTIDLLPYRNQDL |
| | FSVELKPQTMSMRQAEKKLR |
| | DALATGNAEYLGWLVVDDEL |
| | VVDTSKIATDQVKAVEAELG |
| | TIRRWRVDGFFSPSKLRLRP |
| | LQMSKEGIKKESAPELSKIM |
| | RPGWLPAVNKLFSDGNVTVV |
| | RRDSLGRVRLESTAHLPVTW |
| | KVQ (SEQ ID NO: 6) |
| Streptococcus | MTNGKILGLDIGIASVGVGI |
| pasteurianus | IEAKTGKVVHANSRLFSAAN |
| Cas9 | AENNAERRGFRGSRRLNRRK |
| | KHRVKRVRDLFEKYGIVTDF |
| | RNLNLNPYELRVKGLTEQLK |
| | NEELFAALRTISKRRGISYL |
| | DDAEDDSTGSTDYAKSIDEN |
| | RRLLKNKTPGQIQLERLEKY |
| | GQLRGNFTVYDENGEAHRLI |
| | NVFSTSDYEKEARKILETQA |
| | DYNKKITAEFIDDYVEILTQ |
| | KRKYYHGPGNEKSRTDYGRF |
| | RTDGTTLENIFGILIGKCNF |
| | YPDEYRASKASYTAQEYNFL |
| | NDLNNLKVSTETGKLSTEQ |
| | KESLVEFAKNTATLGPAK |
| | LLKEIAKILDCKVDEIKGYR |
| | EDDKGKPDLHTFEPYRKLKF |
| | NLESINIDDLSREVIDKLAD |
| | ILTLNTEREGIEDAIKRNLP |
| | NQFTEEQISEIIKVRKSQST |
| | AFNKGWHSFSAKLMNELIPE |
| | LYATSDEQMTILTRLEKFKV |
| | NKKSSKNTKTIDEKEVTDEI |
| | YNPVVAKSVRQTIKIINAAV |
| | KKYGDFDKIVIEMPRDKNAD |
| | DEKKFIDKRNKENKKEKDDA |
| | LKRAAYLYNSSDKLPDEVFH |
| | GNKQLETKIRLWYQQGERCL |
| | YSGKPISIQELVHNSNNFEI |
| | DHILPLSLSFDDSLANKVLV |
| | YAWTNQEKGQKTPYQVIDSM |
| | DAAWSFREMKDYVLKQKGLG |
| | KKKRDYLLTTENIDKIEVKK |
| | KFIERNLVDTRYASRVVLNS |
| | LQSALRELGKDTKVSVVRGQ |
| | FTSQLRRKWKIDKSRETYHH |
| | HAVDALIIAASSQLKLWEKQ |
| | DNPMIVDYGKNQVVDKQTGE |
| | ILSVSDDEYKELVFQPPYQG |
| | FVNTISSKGFEDEILFSYQV |
| | DSKYNRKVSDATIYSTRKAK |
| | IGKDKKEETYVLGKIKDIYS |
| | QNGFDTFIKKYNKDKTQFLM |
| | YQKDSLTWENVIEVILRDYP |
| | TTKKSEDGKNDVKCNPFEEY |
| | RRENGLICKYSKKGKGTPIK |
| | SLKYYDKKLGNCIDITPEES |
| | RNKVILQSINPWRADVYFNP |
| | ETLKYELMGLKYSDLSFEKG |
| | TGNYHISQEKYDAIKEKEGI |
| | GKKSEFKFTLYRNDLILIKD |
| | IASGEQEIYRFLSRTMPNVN |
| | HYVELKPYDKEKFDNVQELV |
| | EALGEADKVGRCIKGLNKPN |
| | ISIYKVRTDVLGNKYFVKKK |
| | GDKPKLDFKNNKK |
| | (SEQ ID NO: 7) |
| Neisseria | MAAFKPNPMNYILGLDIGIA |
| cinerea | SVGWAIVEIDEEENPIRLID |
| Cas9 | LGVRVFERAEVPKTGDSLAA |
| | ARRLARSVRRLTRRRAHRLL |
| | RARRLLKREGVLQAADFDEN |
| | GLIKSLPNTPWQLRAAALDR |
| | KLTPLEWSAVLLHLIKHRGY |
| | LSQRKNEGETADKELGALLK |
| | GVADNTHALQTGDFRTPAEL |
| | ALNKFEKESGHIRNQRGDYS |
| | HTFNRKDLQAELNLLFEKQK |
| | EFGNPHVSDGLKEGIETLLM |
| | TQRPALSGDAVQKMLGHCTF |
| | EPTEPKAAKNTYTAERFVWL |
| | TKLNNLRILEQGSERPLTDT |
| | ERATLMDEPYRKSKLTYAQA |
| | RKLLDLDDTAFFKGLRYGKD |
| | NAEASTLMEMKAYHAISRAL |
| | EKEGLKDKKSPLNLSPELQD |
| | EIGTAFSLFKTDEDITGRLK |
| | DRVQPEILEALLKHISFDKF |
| | VQISLKALRRIVPLMEQGNR |
| | YDEACTEIYGDHYGKKNTEE |
| | KIYLPPIPADEIRNPVVLRA |
| | LSQARKVINGVVRRYGSPAR |
| | IHIETAREVGKSFKDRKEIE |
| | KRQEENRKDREKSAAKFREY |
| | FPNFVGEPKSKDILKLRLYE |
| | QQHGKCLYSGKEINLGRLNE |
| | KGYVEIDHALPFSRTWDDSF |
| | NNKVLALGSENQNKGNQTPY |
| | EYFNGKDNSREWQEFKARVE |
| | TSRFPRSKKQRILLQKFDED |
| | GFKERNLNDTRYINRFLCQF |
| | VADHMLLTGKGKRRVFASNG |
| | QITNLLRGFWGLRKVRAEND |
| | RHHALDAVVVACSTIAMQQK |
| | ITRFVRYKEMNAFDGKTIDK |
| | ETGEVLHQKAHFPQPWEFFA |
| | QEVMIRVFGKPDGKPEFEEA |
| | DTPEKLRTLLAEKLSSRPEA |
| | VHKYVTPLFISRAPNRKMSG |
| | QGHMETVKSAKRLDEGISVL |
| | RVPLTQLKLKDLEKMVNRER |
| | EPKLYEALKARLEAHKDDPA |
| | KAFAEPFYKYDKAGNRTQQV |
| | KAVRVEQVQKTGVWVHNHNG |
| | IADNATIVRVDVFEKGGKYY |
| | LVPIYSWQVAKGILPDRAVV |
| | QGKDEEDWTVMDDSFEFKFV |
| | LYANDLIKLTAKKNEFLGYF |
| | VSLNRATGAIDIRTHDTDST |
| | KGKNGIFQSVGVKTALSFQK |
| | YQIDELGKEIRPCRLKKRPP |
| | VR (SEQ ID NO: 8) |
| Campylobacter | MRILGFDIGINSIGWAFVEN |
| lari | DELKDCGVRIFTKAENPKNK |
| Cas9 | ESLALPRRNARSSRRRLKRR |
| | KARLIAIKRILAKELKLNYK |
| | DYVAADGELPKAYEGSLASV |
| | YELRYKALTQNLETKDLARV |
| | ILHIAKHRGYMNKNEKKSND |
| | AKKGKILSALKNNALKLENY |
| | QSVGEYFYKEFFQKYKKNTK |
| | NFIKIRNTKDNYNNCVLSSD |
| | LEKELKLILEKQKEFGYNYS |
| | EDFINEILKVAFFQRPLKDF |
| | SHLVGACTFFEEEKRACKNS |
| | YSAWEFVALTKIINEIKSLE |
| | KISGEIVPTQTINEVLNLIL |
| | DKGSITYKKFRSCINLHESI |
| | SFKSLKYDKENAENAKLIDF |
| | RKLVEFKKALGVHSLSRQEL |
| | DQISTHITLIKDNVKLKTVL |
| | EKYNLSNEQINNLLEIEFND |
| | YINLSFKALGMILPLMREGK |
| | RYDEACEIANLKPKTVDEKK |
| | DFLPAFCDSIFAHELSNPVV |
| | NRAISEYRKVLNALLKKYGK |
| | VHKIHLELARDVGLSKKARE |
| | KIEKEQKENQAVNAWALKEC |
| | ENIGLKASAKNILKLKLWKE |
| | QKEICIYSGNKISIEHLKDE |
| | KALEVDHIYPYSRSFDDSFI |
| | NKVLVFTKENQEKLNKTPFE |
| | AFGKNIEKWSKIQTLAQNLP |
| | YKKKNKILDENFKDKQQEDF |
| | ISRNLNDTRYIATLIAKYTK |
| | EYLNFLLLSENENANLKSGE |
| | KGSKIHVQTISGMLTSVLRH |
| | TWGFDKKDRNNHLHHALDAI |
| | IVAYSTNSIIKAFSDFRKNQ |
| | ELLKARFYAKELTSDNYKHQ |
| | VKFFEPFKSFREKILSKIDE |
| | IFVSKPPRKRARRALHKDTF |
| | HSENKIIDKCSYNSKEGLQI |
| | ALSCGRVRKIGTKYVENDTI |
| | VRVDIFKKQNKFYAIPIYAM |
| | DFALGILPNKIVITGKDKNN |
| | NPKQWQTIDESYEFCFSLYK |
| | NDLILLQKKNMQEPEFAYYN |
| | DFSISTSSICVEKHDNKFEN |
| | LTSNQKLLFSNAKEGSVKVE |
| | SLGIQNLKVFEKYIITPLGD |
| | KIKADFQPRENISLKTSKKY |
| | GLR (SEQ ID NO: 9) |
| T. denticola | MKKEIKDYFLGLDVGTGSVG |
| Cas9 | WAVTDTDYKLLKANRKDLWG |
| | MRCFETAETAEVRRLHRGAR |
| | RRIERRKKRIKLLQELFSQE |
| | IAKTDEGFFQRMKESPFYAE |
| | DKTILQENTLFNDKDFADKT |
| | YHKAYPTINHLIKAWIENKV |
| | KPDPRLLYLACHNIIKKRGH |
| | FLFEGDFDSENQFDTSIQAL |
| | FEYLREDMEVDIDADSQKVK |
| | EILKDSSLKNSEKQSRLNKI |
| | LGLKPSDKQKKAITNLISGN |
| | KINFADLYDNPDLKDAEKNS |
| | ISFSKDDFDALSDDLASILG |
| | DSFELLLKAKAVYNCSVLSK |
| | VIGDEQYLSFAKVKIYEKHK |
| | TDLTKLKNVIKKHFPKDYKK |
| | VFGYNKNEKNNNNYSGYVGV |
| | CKTKSKKLIINNSVNQEDFY |
| | KFLKTILSAKSEIKEVNDIL |
| | TEIETGTFLPKQISKSNAEI |
| | PYQLRKMELEKILSNAEKHF |
| | SFLKQKDEKGLSHSEKIIML |
| | LTFKIPYYIGPINDNHKKFF |
| | PDRCWVVKKEKSPSGKTTPW |
| | NFFDHIDKEKTAEAFITSWI |
| | NFCTYLVGESVLPKSSLLYS |
| | EYTVLNEINNLQIIIDGKNI |
| | CDIKLKQKIYEDLFKKYKKI |
| | TQKQISTFIKHEGICNKTDE |
| | VIILGIDKECTSSLKSYIEL |
| | KNIFGKQVDEISTKNMLEEI |
| | IRWATIYDEGEGKTILKTKI |
| | KAEYGKYCSDEQIKKILNLK |
| | FSGWGRLSRKFLETVTSEMP |
| | GFSEPVNIITAMRETQNNLM |
| | ELLSSEFTFTENIKKINSG |
| | FEDAEKQFSYD |
| | GLVKPLFLSPSVKKMLWQTL |
| | KLVKEISHITQAPPKKIFIE |
| | MAKGAELEPARTKTRLKILQ |
| | DLYNNCKNDADAFSSEIKDL |
| | SGKIENEDNLRLRSDKLYLY |
| | YTQLGKCMYCGKPIEIGHVF |
| | DTSNYDIDHIYPQSKIKDDS |
| | ISNRVLVCSSCNKNKEDKYP |
| | LKSEIQSKQRGFWNFLQRNN |
| | FISLEKLNRLTRATPISDDE |
| | TAKFIARQLVETRQATKVAA |
| | KVLEKMFPETKIVYSKAETV |
| | SMFRNKFDIVKCREINDFHH |
| | AHDAYLNIVVGNVYNTKFTN |
| | NPWNFIKEKRDNPKIADTYN |
| | YYKVFDYDVKRNNITAWEKG |
| | KTIITVKDMLKRNTPIYTRQ |
| | AACKKGELFNQTIMKKGLGQ |
| | HPLKKEGPFSNISKYGGYNK |
| | VSAAYYTLIEYEEKGNKIRS |
| | LETIPLYLVKDIQKDQDVLK |
| | SYLTDLLGKKEFKILVPKIK |
| | INSLLKINGFPCHITGKTND |
| | SFLLRPAVQFCCSNNEVLYF |
| | KKIIRFSEIRSQREKIGKTI |
| | SPYEDLSFRSYIKENLWKKT |
| | KNDEIGEKEFYDLLQKKNLE |
| | IYDMLLTKHKDTIYKKRPNS |
| | ATIDILVKGKEKFKSLIIEN |
| | QFEVILEILKLFSATRNVSD |
| | LQHIGGSKYSGVAKIGNKIS |
| | SLDNCILIYQSITGIFEKRI |
| | DLLKV |
| | (SEQ ID NO: 10) |
| S. mutans Cas9 | MKKPYSIGLDIGTNSVGWAV |
| | VTDDYKVPAKKMKVLGNTDK |
| | SHIEKNLLGALLFDSGNTAE |
| | DRRLKRTARRRYTRRRNRIL |
| | YLQEIFSEEMGKVDDSFFHR |
| | LEDSFLVTEDKRGERHPIFG |
| | NLEEEVKYHENFPTIYHLRQ |
| | YLADNPEKVDLRLVYLALAH |
| | IIKFRGHFLIEGKFDTRNND |
| | VQRLFQEFLAVYDNTFENSS |
| | LQEQNVQVEEILTDKISKSA |
| | KKDRVLKLFPNEKSNGRFAE |
| | FLKLIVGNQADFKKHFELEE |
| | KAPLQFSKDTYEEELEVLLA |
| | QIGDNYAELFLSAKKLYDSI |
| | LLSGILTVTDVGTKAPLSAS |
| | MIQRYNEHQMDLAQLKQFIR |
| | QKLSDKYNEVFSDVSKDGYA |
| | GYIDGKTNQEAFYKYLKGLL |
| | NKIEGSGYFLDKIEREDFLR |
| | KQRTFDNGSIPHQIHLQEMR |
| | AIIRRQAEFYPFLADNQDRI |
| | EKLLTFRIPYYVGPLARGKS |
| | DFAWLSRKSADKITPWNFDE |
| | IVDKESSAEAFINRMTNYDL |
| | YLPNQKVLPKHSLLYEKFTV |
| | YNELTKVKYKTEQGKTAFFD |
| | ANMKQEIFDGVFKVYRKVTK |
| | DKLMDFLEKEFDEFRIVDLT |
| | GLDKENKVFNASYGTYHDLC |
| | KILDKDFLDNSKNEKILEDI |
| | VLTLTLFEDREMIRKRLENY |
| | SDLLTKEQVKKLERRHYTGW |
| | GRLSAELIHGIRNKESRKTI |
| | LDYLIDDGNSNRNFMQLIND |
| | DALSFKEEIAKAQVIGETDN |
| | LNQVVSDIAGSPAIKKGILQ |
| | SLKIVDELVKIMGHQPENIV |
| | VEMARENQFTNQGRRNSQQR |
| | LKGLTDSIKEFGSQILKEHP |
| | VENSQLQNDRLFLYYLQNGR |
| | DMYTGEELDIDYLSQYDIDH |
| | IIPQAFIKDNSIDNRVLTSS |
| | KENRGKSDDVPSKDVVRKMK |
| | SYWSKLLSAKLITQRKFDNL |
| | TKAERGGLTDDDKAGFIKRQ |
| | LVETRQITKHVARILDERFN |
| | IETDENNKKIRQVKIVTLKS |
| | NLVSNFRKEFELYKVREIND |
| | YHHAHDAYLNAVIGKALLGV |
| | YPQLEPEFVYGDYPHFHGHK |
| | ENKATAKKFFYSNIMNFFKK |
| | DDVRTDKNGEIIWKKDEHIS |
| | NIKKVLSYPQVNIVKKVEEQ |
| | TGGFSKESILPKGNSDKLIP |
| | RKTKKFYWDTKKYGGFDSPI |
| | VAYSILVIADIEKGKSKKLK |
| | TVKALVGVTIMEKMTFERDP |
| | VAFLERKGYRNVQEENIIKL |
| | PKYSLFKLENGRKRLLASAR |
| | ELQKGNEIVLPNHLGTLLYH |
| | AKNIHKVDEPKHLDYVDKHK |
| | DEFKELLDVVSNFSKKYTLA |
| | EGNLEKIKELYAQNNGEDLK |
| | ELASSFINLLTFTAIGAPAT |
| | FKFFDKNIDRKRYTSTTEIL |
| | NATLIHQSITGLYETRIDLN |
| | KLGGD (SEQ ID NO: 11) |
| S. thermophilus | MTKPYSIGLDIGTNSVGWAV |
| CRISPR3 | TTDNYKVPSKKMKVLGNTSK |
| Cas9 | KYIKKNLLGVLLFDSGITAE |
| | GRRLKRTARRRYTRRRNRIL |
| | YLQEIFSTEMATLDDAFFQ |
| | RLDDSFLVP |
| | DDKRDSKYPIFGNLVEEKAY |
| | HDEFPTIYHLRKYLADSTKK |
| | ADLRLVYLALAHMIKYRGHF |
| | LIEGEFNSKNNDIQKNFQDF |
| | LDTYNAIFESDLSLENSKQL |
| | EEIVKDKISKLEKKDRILKL |
| | FPGEKNSGIFSEFLKLIVGN |
| | QADFRKCFNLDEKASLHFSK |
| | ESYDEDLETLLGYIGDDYSD |
| | VFLKAKKLYDAILLSGFLTV |
| | TDNETEAPLSSAMIKRYNEH |
| | KEDLALLKEYIRNISLKTYN |
| | EVFKDDTKNGYAGYIDGKTN |
| | QEDFYVYLKKLLAEFEGADY |
| | FLEKIDREDFLRKQRTFDNG |
| | SIPYQIHLQEMRAILDKQAK |
| | FYPFLAKNKERIEKILTFRI |
| | PYYVGPLARGNSDFAWSIRK |
| | RNEKITPWNFEDVIDKESSA |
| | EAFINRMTSFDLYLPEEKVL |
| | PKHSLLYETFNVYNELTKVR |
| | FIAESMRDYQFLDSKQKKDI |
| | VRLYFKDKRKVTDKDIIEYL |
| | HAIYGYDGIELKGIEKQFNS |
| | SLSTYHDLLNIINDKEFLDD |
| | SSNEAIIEEIIHTLTIFEDR |
| | EMIKQRLSKFENIFDKSVLK |
| | KLSRRHYTGWGKLSAKLING |
| | IRDEKSGNTILDYLIDDGIS |
| | NRNFMQLIHDDALSFKKKIQ |
| | KAQIIGDEDKGNIKEVVKSL |
| | PGSPAIKKGILQSIKIVDEL |
| | VKVMGGRKPESIVVEMAREN |
| | QYTNQGKSNSQQRLKRLEKS |
| | LKELGSKILKENIPAKLSKI |
| | DNNALQNDRLYLYYLQNGKD |
| | MYTGDDLDIDRLSNYDIDHI |
| | IPQAFLKDNSIDNKVLVSSA |
| | SNRGKSDDVPSLEVVKKRKT |
| | FWYQLLKSKLISQRKFDNLT |
| | KAERGGLSPEDKAGFIQRQL |
| | VETRQITKHVARLLDEKFNN |
| | KKDENNRAVRTVKIITLKST |
| | LVSQFRKDFELYKVREINDF |
| | HHAHDAYLNAVVASALLKKY |
| | PKLEPEFVYGDYPKYNSFRE |
| | RKSATEKVYFYSNIMNIFKK |
| | SISLADGRVIERPLIEVNEE |
| | TGESVWNKESDLATVRRVLS |
| | YPQVNVVKKVEEQNHGLDRG |
| | KPKGLFNANLSSKPKPNSNE |
| | NLVGAKEYLDPKKYGGYAGI |
| | SNSFTVLVKGTIEKGAKKKI |
| | TNVLEFQGISILDRINYRKD |
| | KLNFLLEKGYKDIELIIELP |
| | KYSLFELSDGSRRMLASILS |
| | TNNKRGEIHKGNQIFLSQKF |
| | VKLLYHAKRISNTINENHRK |
| | YVENHKKEFEELFYYILEFN |
| | ENYVGAKKNGKLLNSAFQSW |
| | QNHSIDELCSSFIGPTGSER |
| | KGLFELTSRGSAADFEFLGV |
| | KIPRYRDYTPSSLLKDATLI |
| | HQSVTGLYETRIDLAKLGEG |
| | (SEQ ID NO: 12) |
| C. jejuni Cas9 | MARILAFDIGISSIGWAFSE |
| | NDELKDCGVRIFTKVENPKT |
| | GESLALPRRLARSARKRLAR |
| | RKARLNHLKHLIANEFKLNY |
| | EDYQSFDESLAKAYKGSLIS |
| | PYELRFRALNELLSKQDFAR |
| | VILHIAKRRGYDDIKNSDDK |
| | EKGAILKAIKQNEEKLANYQ |
| | SVGEYLYKEYFQKFKENSKE |
| | FTNVRNKKESYERCIAQSFL |
| | KDELKLIFKKQREFGFSFSK |
| | KFEEEVLSVAFYKRALKDFS |
| | HLVGNCSFFTDEKRAPKNSP |
| | LAFMFVALTRIINLLNNLKN |
| | IEGILYTKDDLNALLNEVLK |
| | NGTLTYKQTKKLLGLSDDYE |
| | FKGEKGTYFIEFKKYKEFIK |
| | ALGEHNLSQDDLNEIAKDIT |
| | LIKDEIKLKKALAKYDLNQN |
| | QIDSLSKLEFKDHLNISFKA |
| | LKLVTPLMLEGKKYDEACNE |
| | LNLKVAINEDKKDFLPAFNE |
| | TYYKDEVTNPVVLRAIKEYR |
| | KVLNALLKKYGKVHKINIEL |
| | AREVGKNHSQRAKIEKEQNE |
| | NYKAKKDAELECEKLGLKIN |
| | SKNILKLRLFKEQKEFCAYS |
| | GEKIKISDLQDEKMLEIDHI |
| | YPYSRSFDDSYMNKVLVFTK |
| | QNQEKLNQTPFEAFGNDSAK |
| | WQKIEVLAKNLPTKKQKRIL |
| | DKNYKDKEQKNFKDRNLNDT |
| | RYIARLVLNYTKDYLDFLPL |
| | SDDENTKLNDTQKGSKVHVE |
| | AKSGMLTSALRHTWGFSAKD |
| | RNNHLHHAIDAVIIAYANNS |
| | IVKAFSDFKKEQESNSAELY |
| | AKKISELDYKNKRKFFEPFS |
| | GFRQKVLDKIDEIFVSKPER |
| | KKPSGALHEETFRKEEEFYQ |
| | SYGGKEGVLKALELGKIRKV |
| | NGKIVKNGDMIRVDIFKHKK |
| | TNKFYAVPIYTMDFALKVLP |
| | NKAVARSKKGEIKDWILMDE |
| | NYEFCFSLYKDSLILIQTKD |
| | MQEPEFVYYNAFTSSTVSLI |
| | VSKHDNKFETLSKNQKILFK |
| | NANEKEVIAKSIGIQNLKVF |
| | EKYIVSALGEVTKAEFRQRE |
| | DFKK (SEQ ID NO: 13) |
| P. multocida | MQTTNLSYILGLDLGIASVG |
| Cas9 | WAVVEINENEDPIGLIDVGV |
| | RIFERAEVPKTGESLALSRR |
| | LARSTRRLIRRRAHRLLLAK |
| | RFLKREGILSTIDLEKGLPN |
| | QAWELRVAGLERRLSAIEWG |
| | AVLLHLIKHRGYLSKRKNES |
| | QTNNKELGALLSGVAQNHQL |
| | LQSDDYRTPAELALKKFAKE |
| | EGHIRNQRGAYTHTFNRLDL |
| | LAELNLLFAQQHQFGNPHCK |
| | EHIQQYMTELLMWQKPAL |
| | SGEAILKMLG |
| | KCTHEKNEFKAAKHTYSAER |
| | FVWLTKLNNLRILEDGAERA |
| | LNEEERQLLINHPYEKSKLT |
| | YAQVRKLLGLSEQAIFKHLR |
| | YSKENAESATFMELKAWHAI |
| | RKALENQGLKDTWQDLAKKP |
| | DLLDEIGTAFSLYKTDEDIQ |
| | QYLTNKVPNSVINALLVSLN |
| | FDKFIELSLKSLRKILPLME |
| | QGKRYDQACREIYGHHYGEA |
| | NQKTSQLLPAIPAQEIRNPV |
| | VLRTLSQARKVINAIIRQYG |
| | SPARVHIETGRELGKSFKER |
| | REIQKQQEDNRTKRESAVQK |
| | FKELFSDFSSEPKSKDILKF |
| | RLYEQQHGKCLYSGKEINIH |
| | RLNEKGYVEIDHALPFSRTW |
| | DDSFNNKVLVLASENQNKGN |
| | QTPYEWLQGKINSERWKNFV |
| | ALVLGSQCSAAKKQRLLTQV |
| | IDDNKFIDRNLNDTRYIARF |
| | LSNYIQENLLLVGKNKKNVF |
| | TPNGQITALLRSRWGLIKAR |
| | ENNNRHHALDAIVVACATPS |
| | MQQKITRFIRFKEVHPYKIE |
| | NRYEMVDQESGEIISPHFPE |
| | PWAYFRQEVNIRVFDNHPDT |
| | VLKEMLPDRPQANHQFVQPL |
| | FVSRAPTRKMSGQGHMETIK |
| | SAKRLAEGISVLRIPLTQLK |
| | PNLLENMVNKEREPALYAGL |
| | KARLAEFNQDPAKAFATPFY |
| | KQGGQQVKAIRVEQVQKSGV |
| | LVRENNGVADNASIVRTDVF |
| | IKNNKFFLVPIYTWQVAKGI |
| | LPNKAIVAHKNEDEWEEMDE |
| | GAKFKFSLFPNDLVELKTKK |
| | EYFFGYYIGLDRATGNISLK |
| | EHDGEISKGKDGVYRVGVKL |
| | ALSFEKYQVDELGKNRQICR |
| | PQQRQPVR |
| | (SEQ ID NO: 14) |
| F. novicida | MNFKILPIAIDLGVKNTGVF |
| Cas9 | SAFYQKGTSLERLDNKNGKV |
| | YELSKDSYTLLMNNRTARRH |
| | QRRGIDRKQLVKRLFKLIWT |
| | EQLNLEWDKDTQQAISFLFN |
| | RRGFSFITDGYSPEYLNIVP |
| | EQVKAILMDIFDDYNGEDDL |
| | DSYLKLATEQESKISE |
| | IYNKLMQKILEF |
| | KLMKLCTDIKDDKVSTKTLK |
| | EITSYEFELLADYLANYSES |
| | LKTQKFSYTDKQGNLKELSY |
| | YHHDKYNIQEFLKRHATIND |
| | RILDTLLTDDLDIWNFNFEK |
| | FDFDKNEEKLQNQEDKDHIQ |
| | AHLHHFVFAVNKIKSEMASG |
| | GRHRSQYFQEITNVLDENNH |
| | QEGYLKNFCENLHNKKYSNL |
| | SVKNLVNLIGNLSNLELKPL |
| | RKYFNDKIHAKADHWDEQKF |
| | TETYCHWILGEWRVGVKDQDK |
| | KDGAKYSYKDLCNELKQKVT |
| | KAGLVDFLLELDPCRTIPPY |
| | LDNNNRKPPKCQSLILNPKF |
| | LDNQYPNWQQYLQELKKLQS |
| | IQNYLDSFETDLKVLKSSKD |
| | QPYFVEYKSSNQQIASGQRD |
| | YKDLDARILQFIFDRVKASD |
| | ELLLNEIYFQAKKLKQKASS |
| | ELEKLESSKKLDEVIANSQL |
| | SQILKSQHTNGIFEQGTFLH |
| | LVCKYYKQRQRARDSRLYIM |
| | PEYRYDKKLHKYNNTGRFDD |
| | DNQLLTYCNHKPRQKRYQLL |
| | NDLAGVLQVSPNFLKDKIGS |
| | DDDLFISKWLVEHIRGFKKA |
| | CEDSLKIQKDNRGLLNHKIN |
| | IARNTKGKCEKEIFNLICKI |
| | EGSEDKKGNYKHGLAYELGV |
| | LLFGEPNEASKPEFDRKIKK |
| | FNSIYSFAQIQQIAFAERKG |
| | NANTCAVCSADNAHRMQQIK |
| | IIEPVEDNKDKIILSAKAQR |
| | LPAIPTRIVDGAVKKMATIL |
| | AKNIVDDNWQNIKQVLSAKH |
| | QLHIPIITESNAFEFEPALA |
| | DVKGKSLKDRRKKALERISP |
| | ENIFKDKNNRIKEFAKGISA |
| | YSGANLTDGDFDGAKEELDH |
| | IIPRSHKKYGTLNDEANLIC |
| | VTRGDNKNKGNRIFCLRDLA |
| | DNYKLKQFETTDDLEIEKKI |
| | ADTIWDANKKDFKFGNYRSF |
| | INLTPQEQKAFRHALFLADE |
| | NPIKQAVIRAINNRNRTFVN |
| | GTQRYFAEVLANNIYLRAKK |
| | ENLNTDKISFDYFGIPTIGN |
| | GRGIAEIRQLYEKVDSDIQA |
| | YAKGDKPQASYSHLIDAMLA |
| | FCIAADEHRNDGSIGLEIDK |
| | NYSLYPLDKNTGEVFTKDIF |
| | SQIKITDNEFSDKKLVRKKA |
| | IEGFNTHRQMTRDGIYAENY |
| | LPILIHKELNEVRKGYTWKN |
| | SEEIKIFKGKKYDIQQLNNL |
| | VYCLKFVDKPISIDIQISTL |
| | EELRNILTTNNIAATAEYYY |
| | INLKTQKLHEYYIENYNTAL |
| | GYKKYSKEMEFLRSLAYRSE |
| | RVKIKSIDDVKQVLDKDSNF |
| | IIGKITLPFKKEWQRLYREW |
| | QNTTIKDDYEFLKSFFNVKS |
| | ITKLHKKVRKDFSLPISTNE |
| | GKFLVKRKTWDNNFIYQILN |
| | DSDSRADGTKPFIPAFDISK |
| | NEIVEAIIDSFTSKNIFWLP |
| | KNIELQKVDNKNIFAIDTSK |
| | WFEVETPSDLRDIGIATIQY |
| | KIDNNSRPKVRVKLDYVIDD |
| | DSKINYFMNHSLLKSRYPDK |
| | VLEILKQSTIIEFESSGFNK |
| | TIKEMLGMKLAGIYNETSNN |
| | (SEQ ID NO: 15) |
| Lactobacillus | MKVNNYHIGLDIGTSSIGWV |
| buchneri Cas9 | AIGKDGKPLRVKGKTAIGAR |
| | LFQEGNPAADRRMFRTTRRR |
| | LSRRKWRLKLLEEIFDPYIT |
| | PVDSTFFARLKQSNLSPKDS |
| | RKEFKGSMLFPDLTDMQYHK |
| | NYPTIYHLRHALMTQDKKFD |
| | IRMVYLAIHHIVKYRGNFLN |
| | STPVDSFKASKVDFVDQFKK |
| | LNELYAAINPEESFKINLAN |
| | SEDIGHQFLDPSIRKFDKKK |
| | QIPKIVPVMMNDKVTDRLNG |
| | KIASEIIHAILGYKAKLDVV |
| | LQCTPVDSKPWALKFDDEDI |
| | DAKLEKILPEMDENQQSIVA |
| | ILQNLYSQVTLNQIVPNGMS |
| | LSESMIEKYNDHHDHLKLYK |
| | KLIDQLADPKKKAVLKKAYS |
| | QYVGDDGKVIEQAEFWSSVK |
| | KNLDDSELSKQIMDLIDAEK |
| | FMPKQRTSQNGVIPHQLHQR |
| | ELDEIIEHQSKYYPWLVEIN |
| | PNKHDLHLAKYKIEQLVAFR |
| | VPYYVGPMITPKDQAESAET |
| | VFSWMERKGIETGQITPWNF |
| | DEKVDRKASANRFIKRMTTK |
| | DTYLIGEDVLPDESLLYEKF |
| | KVLNELNMVRVNGKLLKVAD |
| | KQAIFQDLFENYKHVSVKKL |
| | QNYIKAKTGLPSDPEISGLS |
| | DPEHFNNSLGTYNDFKKLFG |
| | SKVDEPDLQDDFEKIVEWST |
| | VFEDKKILREKLNEITWLSD |
| | QQKDVLESSRYQGWGRLSKK |
| | LLTGIVNDQGERIIDKLWNT |
| | NKNFMQIQSDDDFAKRIHEA |
| | NADQMQAVDVEDVLADAYTS |
| | PQNKKAIRQVVKVVDDIQKA |
| | MGGVAPKYISIEFTRSEDRN |
| | PRRTISRQRQLENTLKDTAK |
| | SLAKSINPELLSELDNAAKS |
| | KKGLTDRLYLYFTQLGKDIY |
| | TGEPINIDELNKYDIDHILP |
| | QAFIKDNSLDNRVLVLTAVN |
| | NGKSDNVPLRMFGAKMGHFW |
| | KQLAEAGLISKRKLKNLQTD |
| | PDTISKYAMHGFIRRQLVET |
| | SQVIKLVANILGDKYRNDDT |
| | KIIEITARMNHQMRDEFGFI |
| | KNREINDYHHAFDAYLTAFL |
| | GRYLYHRYIKLRPYFVYGDF |
| | KKFREDKVTMRNFNFLHDLT |
| | DDTQEKIADAETGEVIWDRE |
| | NSIQQLKDVYHYKFMLISHE |
| | VYTLRGAMFNQTVYPASDAG |
| | KRKLIPVKADRPVNVYGGYS |
| | GSADAYMAIVRIHNKKGDKY |
| | RVVGVPMRALDRLDAAKNVS |
| | DADFDRALKDVLAPQLTKTK |
| | KSRKTGEITQVIEDFEIVLG |
| | KVMYRQLMIDGDKKFMLGSS |
| | TYQYNAKQLVLSDQSVKTLA |
| | SKGRLDPLQESMDYNNVYTE |
| | ILDKVNQYFSLYDMNKFRHK |
| | LNLGFSKFISFPNHNVLDGN |
| | TKVSSGKREILQEILNGLHA |
| | NPTFGNLKDVGITTPFGQLQ |
| | QPNGILLSDETKIRYQSPTG |
| | LFERTVSLKDL |
| | (SEQ ID NO: 16) |
| Listeria | MKKPYTIGLDIGTNSVGWAV |
| innocua | LTDQYDLVKRKMKIAGDSEK |
| Cas9 | KQIKKNFWGVRLFDEGQTAA |
| | DRRMARTARRRIERRRNRIS |
| | YLQGIFAEEMSKTDANFFCR |
| | LSDSFYVDNEKRNSRHPFFA |
| | TIEEEVEYHKNYPTIYHLRE |
| | ELVNSSEKADLRLVYLALAH |
| | IIKYRGNFLIEGALDTQNTS |
| | VDGIYKQFIQTYNQVFASGI |
| | EDGSLKKLEDNKDVAKILVE |
| | KVTRKEKLERILKLYPGEKS |
| | AGMFAQFISLIVGSKGNFQK |
| | PFDLIEKSDIECAKDSYEED |
| | LESLLALIGDEYAELFVAAK |
| | NAYSAVVLSSIITVAEIETN |
| | AKLSASMIERFDTHEEDLGE |
| | LKAFIKLHLPKHYEEIFSNI |
| | EKHGYAGYIDGKTKQADFYK |
| | YMKMTLENIEGADYFIAKIE |
| | KENFLRKQRTFDNGAIPHQL |
| | HLEELEAILHQQAKYYPFLK |
| | ENYDKIKSLVTFRIPYFVGP |
| | LANGQSEFAWLTRKADGEIR |
| | PWNIEEKVDFGKSAVDFIEK |
| | MTNKDTYLPKENVLPKHSLC |
| | YQKYLVYNELTKVRYINDQG |
| | KTSYFSGQEKEQIFNDLFKQ |
| | KRKVKKKDLELFLRNMSHVE |
| | SPTIEGLEDSFNSSYSTYHD |
| | LLKVGIKQEILDNPVNIEML |
| | ENIVKILTVFEDKRMIKEQL |
| | QQFSDVLDGVVLKKLERRHY |
| | TGWGRLSAKLLMGIRDKQSH |
| | LTILDYLMNDDGLNRNLMQL |
| | INDSNLSFKSIIEKEQVTTA |
| | DKDIQSIVADLAGSPAIKKG |
| | ILQSLKIVDELVSVMGYPPQ |
| | TIVVEMARENQTTGKGKNNS |
| | RPRYKSLEKAIKEFGSQILK |
| | EHPTDNQELRNNRLYLYYLQ |
| | NGKDMYTGQDLDIHNLSNYD |
| | IDHIVPQSFITDNSIDNLVL |
| | TSSAGNREKGDDVPPLEIVR |
| | KRKVFWEKLYQGNLMSKRKF |
| | DYLTKAERGGLTEADKARFI |
| | HRQLVETRQITKNVANILHQ |
| | RFNYEKDDHGNTMKQVRIVT |
| | LKSALVSQFRKQFQLYKVRD |
| | VNDYHHAHDAYLNGVVANTL |
| | LKVYPQLEPEFVYGDYHQFD |
| | WFKANKATAKKQFYTNIMLF |
| | FAQKDRIIDENGEILWDKKY |
| | LDTVKKVMSYRQMNIVKKIE |
| | IQKGEFSKATIKPKGNSSKL |
| | IPRKTNWDPMKYGGLDSPNM |
| | AYAVVIEYAKGKNKLVFEKK |
| | IIRVTIMERKAFEKDEKAFL |
| | EEQGYRQPKVLAKLPKYTLY |
| | ECEEGRRRMLASANEAQKGN |
| | QQVLPNHLVTLLHHAANCEV |
| | SDGKSLDYIESNREMFAELL |
| | AHVSEFAKRYTLAEANLNKI |
| | NQLFEQNKEGDIKAIAQSFV |
| | DLMAFNAMGAPASFKFFETT |
| | IERKRYNNLKELLNSTIIYQ |
| | SITGLYESRKRLDD |
| | (SEQ ID NO: 17) |
| L. pneumophilia | MESSQILSPIGIDLGGKFTG |
| Cas9 | VCLSHLEAFAELPNHANTKY |
| | SVILIDHNNFQLSQAQRRAT |
| | RHRVRNKKRNQFVKRVALQL |
| | FQHILSRDLNAKEETALCHY |
| | LNNRGYTYVDTDLDEYIKDE |
| | TTINLLKELLPSESEHNFID |
| | WFLQKMQSSEFRKILVSKVE |
| | EKKDDKELKNAVKNIKNFIT |
| | GFEKNSVEGHRHRKVYFENI |
| | KSDITKDNQLDSIKKKIPSV |
| | CLSNLLGHLSNLQWKNLHRY |
| | LAKNPKQFDEQTFGNEFLRM |
| | LKNFRHLKGSQESLAVRNLI |
| | QQLEQSQDYISILEKTPPEI |
| | TIPPYEARTNTGMEKDQSLL |
| | LNPEKLNNLYPNWRNLIPGI |
| | IDAHPFLEKDLEHTKLRDRK |
| | RIISPSKQDEKRDSYILQRY |
| | LDLNKKIDKFKIKKQLSFLG |
| | QGKQLPANLIETQKEMETHF |
| | NSSLVSVLIQIASAYNKERE |
| | DAAQGIWFDNAFSLCELSNI |
| | NPPRKQKILPLLVGAILSED |
| | FINNKDKWAKFKIFWNTHKI |
| | GRTSLKSKCKEIEEARKNSG |
| | NAFKIDYEEALNHPEHSNNK |
| | ALIKIIQTIPDIIQAIQSHL |
| | GHNDSQALIYHNPFSLSQLY |
| | TILETKRDGFHKNCVAVTCE |
| | NYWRSQKTEIDPEISYASRL |
| | PADSVRPFDGVLARMMQRLA |
| | YEIAMAKWEQIKHIPDNSSL |
| | LIPIYLEQNRFEFEESFKKI |
| | KGSSSDKTLEQAIEKQNIQW |
| | EEKFQRIINASMNICPYKGA |
| | SIGGQGEIDHIYPRSLSKKH |
| | FGVIFNSEVNLIYCSSQGNR |
| | EKKEEHYLLEHLSPLYLKHQ |
| | FGTDNVSDIKNFISQNVANI |
| | KKYISFHLLTPEQQKAARHA |
| | LFLDYDDEAFKTITKFLMSQ |
| | QKARVNGTQKFLGKQIMEFL |
| | STLADSKQLQLEFSIKQITA |
| | EEVHDHRELLSKQEPKLVKS |
| | RQQSFPSHAIDATLTMSIGL |
| | KEFPQFSQELDNSWFINHLM |
| | PDEVHLNPVRSKEKYNKPNI |
| | SSTPLFKDSLYAERFIPVWV |
| | KGETFAIGFSEKDLFEIKPS |
| | NKEKLFTLLKTYSTKNPGES |
| | LQELQAKSKAKWLYFPINKT |
| | LALEFLHHYFHKEIVTPDDT |
| | TVCHFINSLRYYTKKESITV |
| | KILKEPMPVLSVKFESSKKN |
| | VLGSFKHTIALPATKDWERL |
| | FNHPNFLALKANPAPNPKEF |
| | NEFIRKYFLSDNNPNSDIPN |
| | NGHNIKPQKHKAVRKVFSLP |
| | VIPGNAGTMMRIRRKDNKGQ |
| | PLYQLQTIDDTPSMGIQINE |
| | DRLVKQEVLMDAYKTRNLST |
| | IDGINNSEGQAYATFDNWLT |
| | LPVSTFKPEIIKLEMKPHSK |
| | TRRYIRITQSLADFIKTIDE |
| | ALMIKPSDSIDDPLNMPNEI |
| | VCKNKLFGNELKPRDGKMKI |
| | VSTGKIVTYEFESDSTPQWI |
| | QTLYVTQLKKQP |
| | (SEQ ID NO: 18) |
| N. lactamica | MAAFKPNPMNYILGLDIGIA |
| Cas9 | SVGWAMVEVDEEENPIRLID |
| | LGVRVFERAEVPKTGDSLAM |
| | ARRLARSVRRLTRRRAHRLL |
| | RARRLLKREGVLQDADFDEN |
| | GLVKSLPNTPWQLRAAALDR |
| | KLTCLEWSAVLLHLVKHRGY |
| | LSQRKNEGETADKELGALLK |
| | GVADNAHALQTGDFRTPAEL |
| | ALNKFEKESGHIRNQRGDYS |
| | HTFSRKDLQAELNLLFEKQK |
| | EFGNPHVSDGLKEDIETLLM |
| | AQRPALSGDAVQKMLGHCTF |
| | EPAEPKAAKNTYTAERFIWL |
| | TKLNNLRILEQGSERPLTDT |
| | ERATLMDEPYRKSKLTYAQA |
| | RKLLGLEDTAFFKGLRYGKD |
| | NAEASTLMEMKAYHAISRAL |
| | EKEGLKDKKSPLNLSTELQD |
| | EIGTAFSLFKTDKDITGRLK |
| | DRVQPEILEALLKHISFDKF |
| | VQISLKALRRIVPLMEQGKR |
| | YDEACAEIYGDHYCKKNAEE |
| | KIYLPPIPADEIRNPVVLRA |
| | LSQARKVINCVVRRYGSPAR |
| | IHIETAREVGKSFKDRKEIE |
| | KRQEENRKDREKAAAKFREY |
| | FPNFVGEPKSKDILKLRLYE |
| | QQHGKCLYSGKEINLVRLNE |
| | KGYVEIDHALPFSRTWDDSF |
| | NNKVLVLGSENQNKGNQTPY |
| | EYFNGKDNSREWQEFKARVE |
| | TSRFPRSKKQRILLQKFDEE |
| | GFKERNLNDTRYVNRFLCQF |
| | VADHILLTGKGKRRVFASNG |
| | QITNLLRGFWGLRKVRIEND |
| | RHHALDAVVVACSTVAMQQK |
| | ITRFVRYKEMNAFDGKTIDK |
| | ETGEVLHQKAHFPQPWEFFA |
| | QEVMIRVFGKPDGKPEFEEA |
| | DTPEKLRTLLAEKLSSRPEA |
| | VHEYVTPLFVSRAPNRKMSG |
| | QGHMETVKSAKRLDEGISVL |
| | RVPLTQLKLKGLEKMVNRER |
| | EPKLYDALKAQLETHKDDPA |
| | KAFAEPFYKYDKAGSRTQQV |
| | KAVRIEQVQKTGVWVRNHNG |
| | IADNATMVRVDVFEKGGKYY |
| | LVPIYSWQVAKGILPDRAVV |
| | AFKDEEDWTVMDDSFEFRFV |
| | LYANDLIKLTAKKNEFLGYF |
| | VSLNRATGAIDIRTHDTDST |
| | KGKNGIFQSVGVKTALSFQK |
| | NQIDELGKEIRPCRLKKRPP |
| | VR |
| | (SEQ ID NO: 19) |
| N. meningitides | MAAFKPNPINYILGLDIGIA |
| Cas9 | SVGWAMVEIDEDENPICLID |
| | LGVRVFERAEVPKTGDSLAM |
| | ARRLARSVRRLTRRRAHRLL |
| | RARRLLKREGVLQAADFDEN |
| | GLIKSLPNTPWQLRAAALDR |
| | KLTPLEWSAVLLHLIKHRGY |
| | LSQRKNEGETADKELGALLK |
| | GVADNAHALQTGDFRTPAEL |
| | ALNKFEKESGHIRNQRGDYS |
| | HTFSRKDLQAELILLFEKQK |
| | EFGNPHVSGGLKEGIETLLM |
| | TQRPALSGDAVQKMLGHCTF |
| | EPAEPKAAKNTYTAERFIWL |
| | TKLNNLRILEQGSERPLTDT |
| | ERATLMDEPYRKSKLTYAQA |
| | RKLLGLEDTAFFKGLRYGKD |
| | NAEASTLMEMKAYHAISRAL |
| | EKEGLKDKKSPLNLSPELQD |
| | EIGTAFSLFKTDEDITGRLK |
| | DRIQPEILEALLKHISFDKF |
| | VQISLKALRRIVPLMEQGKR |
| | YDEACAEIYGDHYGKKNT |
| | EEKIYLPPIPADEIRNPVVL |
| | RALSQARKVINGVVRRYGSP |
| | ARIHIETAREVGKSFKDRKE |
| | IEKRQEENRKDREKAAAKFR |
| | EYFPNFVGEPKSKDILKLRL |
| | YEQQHGKCLYSGKEINLGRL |
| | NEKGYVEIDHALPFSRTWDD |
| | SFNNKVLVLGSENQNKGNQT |
| | PYEYFNGKDNSREWQEFKAR |
| | VETSRFPRSKKQRILLQKFD |
| | EDGFKERNLNDTRYVNRFLC |
| | QFVADRMRLTGKGKKRVFAS |
| | NGQITNLLRGFWGLRKVRAE |
| | NDRHHALDAVVVACSTVAMQ |
| | QKITRFVRYKEMNAFDGKTI |
| | DKETGEVLHQKTHFPQPWEF |
| | FAQEVMIRVFGKPDGKPEFE |
| | EADTPEKLRTLLAEKLSSRP |
| | EAVHEYVTPLFVSRAPNRKM |
| | SGQGHMETVKSAKRLDEGVS |
| | VLRVPLTQLKLKDLEKMVNR |
| | EREPKLYEALKARLEAHKDD |
| | PAKAFAEPFYKYDKAGNRTQ |
| | QVKAVRVEQVQKTGVWVRNH |
| | NGIADNATMVRVDVFEKGDK |
| | YYLVPIYSWQVAKGILPDRA |
| | VVQGKDEEDWQLIDDSFNFK |
| | FSLHPNDLVEVITKKARMFG |
| | YFASCHRGTGNINIRIHDLD |
| | HKIGKNGILEGIGVKTALSF |
| | QKYQIDELGKEIRPCRLKKR |
| | PPVR |
| | (SEQ ID NO: 20) |
| B. longum | MLSRQLLGASHLARPVSYSY |
| Cas9 | NVQDNDVHCSYGERCFMRGK |
| | RYRIGIDVGLNSVGLAAVEV |
| | SDENSPVRLLNAQSVIHDGG |
| | VDPQKNKEAITRKNMSGVAR |
| | RTRRMRRRKRERLHKLDMLL |
| | GKFGYPVIEPESLDKPFEEW |
| | HVRAELATRYIEDDELRRES |
| | ISIALRHMARHRGWRNPYRQ |
| | VDSLISDNPYSKQYGELKEK |
| | AKAYNDDATAAEEESTPAQL |
| | VVAMLDAGYAEAPRLRWRTG |
| | SKKPDAEGYLPVRLMQEDNA |
| | NELKQIFRVQRVPADEWKPL |
| | FRSVFYAVSPKGSAEQRVGQ |
| | DPLAPEQARALKASLAFQEY |
| | RIANVITNLRIKDASAELRK |
| | LTVDEKQSIYDQLVSPSSED |
| | ITWSDLCDFLGFKRSQLKGV |
| | GSLTEDGEERISSRPPRLTS |
| | VQRIYESDNKIRKPLVAWWK |
| | SASDNEHEAMIRLLSNTVDI |
| | DKVREDVAYASAIEFIDGLD |
| | DDALTKLDSVDLPSGRAAYS |
| | VETLQKLTRQMLTTDDDLHE |
| | ARKTLFNVTDSWRPPADPIG |
| | EPLGNPSVDRVLKNVNRYLM |
| | NCQQRWGNPVSVNIEHVRSS |
| | FSSVAFARKDKREYEKNNEK |
| | RSIFRSSLSEQLRADEQMEK |
| | VRESDLRRLEAIQRQNGQCL |
| | YCGRTITFRTCEMDHIVPRK |
| | GVGSTNTRTNFAAVCAECNR |
| | MKSNTPFAIWARSEDAQTRG |
| | VSLAEAKKRVTMFTFNPKSY |
| | APREVKAFKQAVIARLQQTE |
| | DDAAIDNRSIESVAWMADEL |
| | HRRIDWYFNAKQYVNSASID |
| | DAEAETMKTTVSVFQGRVTA |
| | SARRAAGIEGKIHFIGQQSK |
| | TRLDRRHHAVDASVIAMMNT |
| | AAAQTLMERESLRESQRLIG |
| | LMPGERSWKEYPYEGTSRYE |
| | SFHLWLDNMDVLLELLNDAL |
| | DNDRIAVMQSQRYVLGNSIA |
| | HDATIHPLEKVPLGSAMSAD |
| | LIRRASTPALWCALTRLPDY |
| | DEKEGLPEDSHREIRVHDTR |
| | YSADDEMGFFASQAAQIAVQ |
| | EGSADIGSAIHHARVYRCWK |
| | TNAKGVRKYFYGMIRVFQTD |
| | LLRACHDDLFTVPLPPQSIS |
| | MRYGEPRVVQALQSGNAQYL |
| | GSLVVGDEIEMDFSSLDVDG |
| | QIGEYLQFFSQFSGGNLAWK |
| | HWVVDGFFNQTQLRIRPRYL |
| | AAEGLAKAFSDDVVPDGVQK |
| | IVTKQGWLPPVNTASKTAVR |
| | IVRRNAFGEPRLSSAHHMPC |
| | SWQWRHE |
| | (SEQ ID NO: 21) |
| A. muciniphila | MSRSLTFSFDIGYASIGWAV |
| Cas9 | IASASHDDADPSVCGCGTVL |
| | FPKDDCQAFKRREYRRLRRN |
| | IRSRRVRIERIGRLLVQAQI |
| | ITPEMKETSGHPAPFYLASE |
| | ALKGHRTLAPIELWHVLRWY |
| | AHNRGYDNNASWSNSLSEDG |
| | GNGEDTERVKHAQDLMDKHG |
| | TATMAETICRELKLEEGKAD |
| | APMEVSTPAYKNLNTAFPRL |
| | IVEKEVRRILELSAPLIPGL |
| | TAEIIELIAQHHPLTTEQ |
| | RGVLLQHGIKLARRYRGS |
| | LLFGQLIPRFDNRIISRCPV |
| | TWAQVYEAELKKGNSEQSAR |
| | ERAEKLSKVPTANCPEFYEY |
| | RMARILCNIRADGEPLSAEI |
| | RRELMNQARQEGKLTKASLE |
| | KAISSRLGKETETNVSNYFT |
| | LHPDSEEALYLNPAVEVLQR |
| | SGIGQILSPSVYRIAANRLR |
| | RGKSVTPNYLLNLLKSRGES |
| | GEALEKKIEKESKKKEADYA |
| | DTPLKPKYATGRAPYARTVL |
| | KKVVEEILDGEDPTRPARGE |
| | AHPDGELKAHDGCLYCLLDT |
| | DSSVNQHQKERRLDTMTNNH |
| | LVRHRMLILDRLLKDLIQDF |
| | ADGQKDRISRVCVEVGKELT |
| | TFSAMDSKKIQRELTLRQKS |
| | HTDAVNRLKRKLPGKALSAN |
| | LIRKCRIAMDMNWTCPFTGA |
| | TYGDHELENLELEHIVPHSF |
| | RQSNALSSLVLTWPGVNRMK |
| | GQRTGYDFVEQEQENPVPDK |
| | PNLHICSLNNYRELVEKLDD |
| | KKGHEDDRRRKKKRKALLMV |
| | RGLSHKHQSQNHEAMKEIGM |
| | TEGMMTQSSHLMKLACKSIK |
| | TSLPDAHIDMIPGAVTAEVR |
| | KAWDVFGVFKELCPEAADPD |
| | SGKILKENLRSLTHLHHALD |
| | ACVLGLIPYIIPAHHNGLLR |
| | RVLAMRRIPEKLIPQVRPVA |
| | NQRHYVLNDDGRMMLRDLSA |
| | SLKENIREQLMEQRVIQHVP |
| | ADMGGALLKETMQRVLSVDG |
| | SGEDAMVSLSKKKDGKKEKN |
| | QVKASKLVGVFPEGPSKLKA |
| | LKAAIEIDGNYGVALDPKPV |
| | VIRHIKVFKRIMALKEQNGG |
| | KPVRILKKGMLIHLTSSKDP |
| | KHAGVWRIESIQDSKGGVKL |
| | DLQRAHCAVPKNKTHECNWR |
| | EVDLISLLKKYQMKRYPTSY |
| | TGTPR |
| | (SEQ ID NO: 22) |
| O. laneus Cas9 | METTLGIDLGTNSIGLALVD |
| | QEEHQILYSGVRIFPEGINK |
| | DTIGLGEKEESRNATRRAKR |
| | QMRRQYFRKKLRKAKLLELL |
| | IAYDMCPLKPEDVRRWKNWD |
| | KQQKSTVRQFPDTPAFREWL |
| | KQNPYELRKQAVTEDVTRPE |
| | LGRILYQMIQRRGFLSSRKG |
| | KEEGKIFTGKDRMVGIDETR |
| | KNLQKQTLGAYLYDIAPKNG |
| | EKYRFRTERVRARYTLRDMY |
| | IREFEIIWQRQAGHLGLAHE |
| | QATRKKNIFLEGSATNVRNS |
| | KLITHLQAKYGRGHVLIEDT |
| | RITVTFQLPLKEVLGGKIEI |
| | EEEQLKFKSNESVLFWQRPL |
| | RSQKSLLSKCVFEGRNFYDP |
| | VHQKWIIAGPTPAPLSHPEF |
| | EEFRAYQFINNIIYGKNEHL |
| | TAIQREAVFELMCTESKDFN |
| | FEKIPKHLKLFEKFNFDDTT |
| | KVPACTTISQLRKLFPHPVW |
| | EEKREEIWHCFYFYDDNTLL |
| | FEKLQKDYALQTNDLEKIKK |
| | IRLSESYGNVSLKAIRRINP |
| | YLKKGYAYSTAVLLGGIRNS |
| | FGKRFEYFKEYEPEIEKAVC |
| | RILKEKNAEGEVIRKIKDYL |
| | VHNRFGFAKNDRAFQKLYHH |
| | SQAITTQAQKERLPETGNLR |
| | NPIVQQGLNELRRTVNKLLA |
| | TCREKYGPSFKFDHIHVEMG |
| | RELRSSKTEREKQSRQIREN |
| | EKKNEAAK |
| | VKLAEYGLKAYRDNIQKYLL |
| | YKEIEEKGGTVCCPYTGKTL |
| | NISHTLGSDNSVQIEHIIPY |
| | SISLDDSLANKTLCDATFNR |
| | EKGELTPYDFYQKDPSPEKW |
| | GASSWEEIEDRAFRLLPYAK |
| | AQRFIRRKPQESNEFISRQL |
| | NDTRYISKKAVEYLSAICSD |
| | VKAFPGQLTAELRHLWGLNN |
| | ILQSAPDITFPLPVSATENH |
| | REYYVITNEQNEVIRLFPKQ |
| | GETPRTEKGELLLTGEVERK |
| | VFRCKGMQEFQTDVSDGKYW |
| | RRIKLSSSVTWSPLFAPKPI |
| | SADGQIVLKGRIEKGVFVCN |
| | QLKQKLKTGLPDGSYWISLP |
| | VISQTFKEGESVNNSKLTSQ |
| | QVQLFGRVREGIFRCHNYQC |
| | PASGADGNFWCTLDTDTAQP |
| | AFTPIKNAPPGVGGGQIILT |
| | GDVDDKGIFHADDDLHYELP |
| | ASLPKGKYYGIFTVESCDPT |
| | LIPIELSAPKTSKGENLIEG |
| | NIWVDEHTGEVRFDPKKNRE |
| | DQRHHAIDAIVIALSSQSLF |
| | QRLSTYNARRENKKRGLDST |
| | EHFPSPWPGFAQDVRQSVVP |
| | LLVSYKQNPKTLCKISKTLY |
| | KDGKKIHSCGNAVRGQLHKE |
| | TVYGQRTAPGAIEKSYHIRK |
| | DIRELKTSKHIGKVVDITIR |
| | QMLLKHLQENYHIDITQEFN |
| | IPSNAFFKEGVYRIFLPNKH |
| | GEPVPIKKIRMKEELGNAER |
| | LKDNINQYVNPRNNHHVMIY |
| | QDADGNLKEEIVSFWSVIER |
| | QNQGQPIYQLPREGRNIVSI |
| | LQINDTFLIGLKEEEPEVYR |
| | NDLSTLSKHLYRVQKLSGMY |
| | YTFRHHLASTLNNEREEFRI |
| | QSLEAWKRANPVKVQIDEIG |
| | RITFLNGPLC |
| | (SEQ ID NO: 23) |

[0062] Nuclease inactivated S. pyogenes Cas9 proteins may comprise a substitution of an Alanine (A) for an Aspartic Acid (D) at position 10 and an alanine (A) for a Histidine (H) at position 840. Exemplary nuclease inactivated S. pyogenes Cas9 proteins of the disclosure may comprise or consist of the amino acid sequence (D10A and H840A bolded and underlined):

(SEQ ID NO: 24)

| | |
|---|---|
| 1 | MDKKYSIGLA IGTNSVGWAV ITDEYKVPSK |
| | KFKVLGNTDR HSIKKNLIGA LLFDSGETAE |
| 61 | ATRLKRTARR RYTRRKNRIC YLQEIFSNEM |
| | AKVDDSFFHR LEESFLVEED KKHERHPIFG |
| 121 | NIVDEVAYHE KYPTIYHLRK KLVDSTDKAD |
| | LRLIYLALAH MIKFRGHFLI EGDLNPDNSD |
| 181 | VDKLFIQLVQ TYNQLFEENP INASGVDAKA |
| | ILSARLSKSR RLENLIAQLP GEKKNGLFGN |
| 241 | LIALSLGLTP NFKSNFDLAE DAKLQLSKDT |
| | YDDDLDNLLA QIGDQYADLF LAAKNLSDAI |
| 301 | LLSDILRVNT EITKAPLSAS MIKRYDEHHQ |
| | DLTLLKALVR QQLPEKYKEI FFDQSKNGYA |
| 361 | GYIDGGASQE EFYKFIKPIL EKMDGIEELL |
| | VKLNREDLLR KQRTFDNGSI PHQIHLGELH |
| 421 | AILRRQEDFY PFLKDNREKI EKILTFRIPY |
| | YVGPLARGNS RFAWMTRKSE ETITPWNFEE |
| 481 | VVDKGASAQS FIERMTNFDK NLPNEKVLPK |
| | HSLLYEYFTV YNELTKVKYV IEGMRKPAFL |
| 541 | SGEQKKAIVD LLFKTNRKVT VKQLKEDYFK |
| | KIECFDSVEI SGVEDRFNAS LGTYHDLLKI |
| 601 | IKDKDFLDNE ENEDILEDIV LTLTLFEDRE |
| | MIEERLKTYA HLFDDKVMKQ LKRRRYTGWG |
| 661 | RLSRKLINGI RDKQSGKTIL DFLKSDGFAN |
| | RNFMQLIHDD SLTFKEDIQK AQVSGQGDSL |
| 721 | HEHIANLAGS PAIKKGILQT VKVVDELVKV |
| | MGRHKPENIV IEMARENQTT QKGQKNSRER |
| 781 | MKRIEEGIKE LGSQILKEHP VENTQLQNEK |
| | LYLYYLQNGR DMYVDQELDI NRLSDYDVDA |
| 841 | IVPQSFLKDD SIDNKVLTRS DKNRGKSDNV |
| | PSEEVVKKMK NYWRQLLNAK LITQRKFDNL |
| 901 | TKAERGGLSE LDKAGFIKRQ LVETRQITKH |
| | VAQILDSRMN TKYDENDKLI REVKVITLKS |
| 961 | KLVSDFRKDF QFYKVREINN YHHAHDAYLN |
| | AVVGTALIKK YPKLESEFVY GDYKVYDVRK |
| 1021 | MIAKSEQEIG KATAKYFFYS NIMNFFKIEI |
| | TLANGEIRKR PLIETNGETG EIVWDKGRDF |
| 1081 | ATVRKVLSMP QVNIVKKTEV QTGGFSKESI |
| | LPKRNSDKLI ARKKDWDPKK YGGFDSPTVA |
| 1141 | YSVLVVAKVE KGKSKKLKSV KELLGITIME |
| | RSSFEKNPID FLEAKGYKEV KKDLIIKLPK |
| 1201 | YSLFELENGR KRMLASAGEL QKGNELALPS |
| | KYVNFLYLAS HYEKLKGSPE DNEQKQLFVE |
| 1261 | QHKHYLDEII EQISEFSKRV ILADANLDKV |
| | LSAYNKHRDK PIREQAENII HLFTLTNLGA |
| 1321 | PAAFKYFDTT IDRKRYTSTK EVLDATLIHQ |
| | SITGLYETRI DLSQLGGD. |

[0063] Exemplary wild type Francisella tularensis subsp. Novicida Cpf1 (FnCpf1) proteins of the disclosure may comprise or consist of the amino acid sequence:

(SEQ ID NO: 25)

| | |
|---|---|
| 1 | MSIYQEFVNK YSLSKTLRFE LIPQGKTLEN |
| | IKARGLILDD EKRAKDYKKA KQIIDKYHQF |
| 61 | FIEEILSSVC ISEDLLQNYS DVYFKLKKSD |
| | DDNLQKDFKS AKDTIKKQIS EYIKDSEKFK |
| 121 | NLFNQNLIDA KKGQESDLIL WLKQSKDNGI |
| | ELFKANSDIT DIDEALEIIK SFKGWTTYFK |
| 181 | GFHENRKNVY SSNDIPTSII YRIVDDNLPK |
| | FLENKAKYES LKDKAPEAIN YEQIKKDLAE |
| 241 | ELTFDIDYKT SEVNQRVFSL DEVFEIANFN |
| | NYLNQSGITK FNTIIGGKFV NGENTKRKGI |
| 301 | NEYINLYSQQ INDKTLKKYK MSVLFKQILS |
| | DTESKSFVID KLEDDSDVVT TMQSFYEQIA |
| 361 | AFKTVEEKSI KETLSLLFDD LKAQKLDLSK |
| | IYFKNDKSLT DLSQQVFDDY SVIGTAVLEY |
| 421 | ITQQIAPKNL DNPSKKEQEL IAKKTEKAKY |
| | LSLETIKLAL EEFNKHRDID KQCRFEEILA |
| 481 | NFAAIPMIFD EIAQNKDNLA QISIKYQNQG |
| | KKDLLQASAE DDVKAIKDLL DQTNNLLHKL |
| 541 | KIFHISQSED KANILDKDEH FYLVFEECYF |
| | ELANIVPLYN KIRNYITQKP YSDEKFKLNF |
| 601 | ENSTLANGWD KNKEPDNTAI LFIKDDKYYL |
| | GVMNKKNNKI FDDKAIKENK GEGYKKIVYK |
| 661 | LLPGANKMLP KVFFSAKSIK FYNPSEDILR |
| | IRNHSTHTKN GSPQKGYEKF EFNIEDCRKF |
| 721 | IDFYKQSISK HPEWKDFGFR FSDTQRYNSI |
| | DEFYREVENQ GYKLTFENIS ESYIDSVVNQ |
| 781 | GKLYLFQIYN KDFSAYSKGR PNLHTLYWKA |
| | LFDERNLQDV VYKLNGEAEL FYRKQSIPKK |
| 841 | ITHPAKEAIA NKNKDNPKKE SVFEYDLIKD |
| | KRFTEDKFFF HCPITINFKS SGANKFNDEI |
| 901 | NLLLKEKAND VHILSIDRGE RHLAYYTLVD |
| | GKGNIIKQDT FNIIGNDRMK TNYHDKLAAI |
| 961 | EKDRDSARKD WKKINNIKEM KEGYLSQVVH |
| | EIAKLVIEYN AIVVFEDLNF GFKRGRFKVE |
| 1021 | KQVYQKLEKM LIEKLNYLVF KDNEFDKTGG |
| | VLRAYQLTAP FETFKKMGKQ TGIIYYVPAG |
| 1081 | FTSKICPVTG FVNQLYPKYE SVSKSQEFFS |
| | KFDKICYNLD KGYFEFSFDY KNFGDKAAKG |
| 1141 | KWTIASFGSR LINFRNSDKN HNWDTREVYP |
| | TKELEKLLKD YSIEYGHGEC IKAAICGESD |
| 1201 | KKFFAKLTSV LNTILQMRNS KTGTELDYLI |
| | SPVADVNGNF FDSRQAPKNM PQDADANGAY |
| 1261 | HIGLKGLMLL GRIKNNQEGK KLNLVIKNEE |
| | YFEFVQNRNN |

[0064] Exemplary wild type Lachnospiraceae bacterium sp. ND2006 Cpf1 (LbCpf1) proteins of the disclosure may comprise or consist of the amino acid sequence:

(SEQ ID NO: 26)

| | |
|---|---|
| 1 | AASKLEKFTN CYSLSKTLRF KAIPVGKTQE |
| | NIDNKRLLVE DEKRAEDYKG VKKLLDRYYL |
| 61 | SFINDVLHSI KLKNLNNYIS LFRKKTRTEK |
| | ENKELENLEI NLRKEIAKAF KGAAGYKSLF |
| 121 | KKDIIETILP EAADDKDEIA LVNSENGETT |
| | AFTGFFDNRE NMFSEEAKST SIAFRCINEN |
| 181 | LTRYISNMDI FEKVDAIFDK HEVQEIKEKI |
| | LNSDYDVEDF FEGEFFNFVL TQEGIDVYNA |
| 241 | IIGGFVTESG EKIKGLNEYI NLYNAKTKQA |
| | LPKFKPLYKQ VLSDRESLSF YGEGYTSDEE |
| 301 | VLEVFRNTLN KNSEIFSSIK KLEKLFKNFD |
| | EYSSAGIFVK NGPAISTISK DIFGEWNLIR |
| 361 | DKWNAEYDDI HLKKKAVVTE KYEDDRRKSF |
| | KKIGSFSLEQ LQEYADADLS VVEKLKEIII |
| 421 | QKVDEIYKVY GSSEKLFDAD FVLEKSLKKN |
| | DAVVAIMKDL LDSVKSFENY IKAFFGEGKE |
| 481 | TNRDESFYGD FVLAYDILLK VDHIYDAIRN |
| | YVTQKPYSKD KFKLYFQNPQ FMGGWDKDKE |
| 541 | TDYRATILRY GSKYYLAIMD KKYAKCLQKI |
| | DKDDVNGNYE KINYKLLPGP NKMLPKVFFS |
| 601 | KKWMAYYNPS EDIQKIYKNG TFKKGDMFNL |
| | NDCHKLIDFF KDSISRYPKW SNAYDFNFSE |
| 661 | TEKYKDIAGF YREVEEQGYK VSFESASKKE |
| | VDKLVEEGKL YMFQIYNKDF SDKSHGTPNL |
| 721 | HTMYFKLLFD ENNHGQIRLS GGAELFMRRA |
| | SLKKEELVVH PANSPIANKN PDNPKKTTTL |
| 781 | SYDVYKDKRF SEDQYELHIP IAINKCPKNI |
| | FKINTEVRVL LKHDDNPYVI GIDRGERNLL |
| 841 | YIVVVDGKGN IVEQYSLNEI INNFNGIRIK |
| | TDYHSLLDKK EKERFEARQN WTSIENIKEL |
| 901 | KAGYISQVVH KICELVEKYD AVIALEDLNS |
| | GFKNSRVKVE KQVYQKFEKM LIDKLNYMVD |
| 961 | KKSNPCATGG ALKGYQITNK FESFKSMSTQ |
| | NGFIFYIPAW LTSKIDPSTG FVNLLKTKYT |
| 1021 | SIADSKKFIS SFDRIMYVPE EDLFEFALDY |
| | KNFSRTDADY IKKWKLYSYG NRIRIFAAAK |
| 1081 | KNNVFAWEEV CLTSAYKELF NKYGINYQQG |
| | DIRALLCEQS DKAFYSSFMA LMSLMLQMRN |
| 1141 | SITGRTDVDF LISPVKNSDG IFYDSRNYEA |
| | QENAILPKNA DANGAYNIAR KVLWAIGQFK |
| 1201 | KAEDEKLDKV KIAISNKEWL EYAQTSVK |

[0065] Exemplary wild type Acidaminococcus sp. BV3L6 Cpf1 (AsCpf1) proteins of the disclosure may comprise or consist of the amino acid sequence:

(SEQ ID NO: 27)

| | |
|---|---|
| 1 | MTQFEGFTNL YQVSKTLRFE LIPQGKTLKH |
| | IQEQGFIEED KARNDHYKEL KPIIDRIYKT |
| 61 | YADQCLQLVQ LDWENLSAAI DSYRKEKTEE |
| | TRNALIEEQA TYRNAIHDYF IGRIDNLIDA |
| 121 | INKRHAEIYK GLFKAELENG KVLKQLGTVT |
| | TTEHENALLR SFDKFTTYFS GFYENRKNVF |
| 181 | SAEDISTAIP HRIVQDNFPK FKENCHIFTR |
| | LITAVPSLRE HFENVKKAIG IFVSTSIEEV |
| 241 | FSFPFYNQLL TQTQIDLYNQ LLGGISREAG |
| | TEKIKGLNEV LNLAIQKNDE TAHIIASLPH |
| 301 | RFIPLFKQIL SDRNTLSFIL EEFKSDEEVI |
| | QSFCKYKTLL RNENVLETAE ALFNELNSID |
| 361 | LTHIFISHKK LETISSALCD HWDTLRNALY |
| | ERRISELTGK ITKSAKEKVQ RSLKHEDINL |
| 421 | QEIISAAGKE LSEAFKQKTS EILSHAHAAL |
| | DQPLPTTLKK QEEKEILKSQ LDSLLGLYHL |
| 481 | LDWFAVDESN EVDPEFSARL TGIKLEMEPS |
| | LSFYNKARNY ATKKPYSVEK FKLNFQMPTL |
| 541 | ASGWDVNKEK NNGAILFVKN GLYYLGIMPK |
| | QKGRYKALSF EPTEKTSEGF DKMYYDYFPD |
| 601 | AAKMIPKCST QLKAVTAHFQ THTTPILLSN |
| | NFIEPLEITK EIYDLNNPEK EPKKFQTAYA |
| 661 | KKTGDQKGYR EALCKWIDFT RDFLSKYTKT |
| | TSIDLSSLRP SSQYKDLGEY YAELNPLLYH |
| 721 | ISFQRIAEKE IMDAVETGKL YLFQIYNKDF |
| | AKGHHGKPNL HTLYWTGLFS PENLAKTSIK |
| 781 | LNGQAELFYR PKSRMKRMAH RLGEKMLNKK |
| | LKDQKTPIPD TLYQELYDYV NHRLSHDLSD |
| 841 | EARALLPNVI TKEVSHEIIK DRRFTSDKFF |
| | FHVPITLNYQ AANSPSKFNQ RVNAYLKEHP |
| 901 | ETPIIGIDRG ERNLIYITVI DSTGKILEQR |
| | SLNTIQQFDY QKKLDNREKE RVAARQAWSV |
| 961 | VGTIKDLKQG YLSQVIHEIV DLMIHYQAVV |
| | VLENLNFGFK SKRTGIAEKA VYQQFEKMLI |
| 1021 | DKLNCLVLKD YPAEKVGGVL NPYQLTDQFT |
| | SFAKMGTQSG FLFYVPAPYT SKIDPLTGFV |
| 1081 | DPFVWKTIKN HESRKHFLEG FDFLHYDVKT |
| | GDFILHFKMN RNLSFQRGLP GFMPAWDIVF |
| 1141 | EKNETQFDAK GTPFIAGKRI VPVIENHRFT |
| | GRYRDLYPAN ELIALLEEKG IVFRDGSNIL |
| 1201 | PKLLENDDSH AIDTMVALIR SVLQMRNSNA |
| | ATGEDYINSP VRDLNGVCFD SRFQNPEWPM |
| 1261 | DADANGAYHI ALKGQLLLNH LKESKDLKLQ |
| | NGISNQDWLA YIQELRN |

[0066] In some embodiments of the compositions of the disclosure, the sequence encoding the RNA binding protein comprises a sequence isolated or derived from a CRISPR Cas protein or RNA-binding portion thereof. In some embodiments, the CRISPR Cas protein comprises a Type VI CRISPR Cas protein. In some embodiments, the Type VI CRISPR Cas protein comprises a Cas13 protein. Exemplary Cas13 proteins of the disclosure may be isolated or derived from any species, including, but not limited to, a bacteria or an archaea. Exemplary Cas13 proteins of the disclosure may be isolated or derived from any species, including, but not limited to, Leptotrichia wadei, Listeria seeligeri serovar 1/2b (strain ATCC 35967/DSM 20751/CIP 100100/SLCC 3954), Lachnospiraceae bacterium, Clostridium aminophilum DSM 10710, Carnobacterium gallinarum DSM 4847, Paludibacter propionicigenes WB4, Listeria weihenstephanensis FSL R9-0317, Listeria weihenstephanensis FSL R9-0317, bacterium FSL M6-0635 (Listeria newyorkensis), Leptotrichia wadei F0279, Rhodobacter capsulatus SB 1003, Rhodobacter capsulatus R121, Rhodobacter capsulatus DE442 and Corynebacterium ulcerans. Exemplary Cas13 proteins of the disclosure may be DNA nuclease inactivated. Exemplary Cas13 proteins of the disclosure include, but are not limited to, Cas13a, Cas13b, Cas13c, Cas13d, and orthologs thereof. Exemplary Cas13b proteins of the disclosure include, but are not limited to, subtypes 1 and 2 referred to herein as Csx27 and Csx28, respectively.

[0067] Exemplary Cas13a proteins include, but are not limited to:

| | Cas13a | | | Direct |
|---|---|---|---|---|
| Cas13a | abbrevia- | Organism | Accession | Repeat |
| number | tion | name | number | sequence |
| Cas13a1 | LshCas13a | Leptotrichia | WP_018451595.1 | CCAC |
| | | shahii | (SEQ ID NO: | CCCA |
| | | | 194) | ATAT |
| | | | | CGAA |
| | | | | GGGG |
| | | | | ACTA |
| | | | | AAAC |
| | | | | (SEQ |
| | | | | ID |
| | | | | NO: |
| | | | | 28) |
| Cas13a2 | LwaCas13a | Leptotrichia | WP_021746774.1 | GATT |
| | | wadei | (SEQ ID NO: | TAGA |
| | | | 195) | CTAC |
| | | | | CCCA |
| | | | | AAAA |
| | | | | CGAA |
| | | | | GGGG |
| | | | | ACTA |
| | | | | AAAC |
| | | | | (SEQ |
| | | | | ID |
| | | | | NO: |
| | | | | 29) |
| Cas13a3 | LseCas13a | Listeria | WP_012985477.1 | GTAA |
| | | seeligeri | (SEQ ID NO: | GAGA |
| | | | 196) | CTAC |
| | | | | CTCT |
| | | | | ATAT |
| | | | | GAAA |
| | | | | GAGG |
| | | | | ACTA |
| | | | | AAAC |
| | | | | (SEQ |
| | | | | ID |
| | | | | NO: |
| | | | | 30) |
| Cas13a4 | LbmCas13a | Lachnospiraceae | WP_044921188.1 | GTAT |
| | | bacterium | (SEQ ID NO: | TGAG |
| | | MA2020 | 197) | AAAA |
| | | | | GCCA |
| | | | | GATA |
| | | | | TAGT |
| | | | | TGGC |
| | | | | AATA |
| | | | | GAC |
| | | | | (SEQ |
| | | | | ID |
| | | | | NO: |
| | | | | 31) |
| Cas13a5 | LbnCas13a | Lachnospiraceae | WP_022785443.1 | GTTG |
| | | bacterium | (SEQ ID NO: | ATGA |
| | | NK4A179 | 198) | GAAG |
| | | | | AGCC |
| | | | | CAAG |
| | | | | ATAG |
| | | | | AGGG |
| | | | | CAAT |
| | | | | AAC |
| | | | | (SEQ |
| | | | | ID |
| | | | | NO: |
| | | | | 32) |
| Cas13a6 | CamCas13a | [Clostridium] | WP_031473346.1 | GTCT |
| | | aminophilum | (SEQ ID NO: | ATTG |
| | | DSM 10710 | 199) | CCCT |
| | | | | CTAT |
| | | | | ATCG |
| | | | | GGCT |
| | | | | GTTC |
| | | | | TCCA |
| | | | | AAC |
| | | | | (SEQ |
| | | | | ID |
| | | | | NO: |
| | | | | 33) |
| Cas13a7 | CgaCas13a | Carnobacterium | WP_034560163.1 | ATTA |
| | | gallinarum | (SEQ ID NO: | AAGA |
| | | DSM 4847 | 200) | CTAC |
| | | | | CTCT |
| | | | | AAAT |
| | | | | GTAA |
| | | | | GAGG |
| | | | | ACTA |
| | | | | TAAC |
| | | | | (SEQ |
| | | | | ID |
| | | | | NO: |
| | | | | 34) |
| Cas13a8 | Cga2Cas13a | Carnobacterium | WP_034563842.1 | AATA |
| | | gallinarum | (SEQ ID NO: | TAAA |
| | | DSM 4847 | 201) | CTAC |
| | | | | CTCT |
| | | | | AAAT |
| | | | | GTAA |
| | | | | GAGG |
| | | | | ACTA |
| | | | | TAAC |
| | | | | (SEQ |
| | | | | ID |
| | | | | NO: |
| | | | | 35) |
| Cas13a9 | Pprcas13a | Paludibacter | WP_013443710.1 | CTTG |
| | | propionicigenes | (SEQ ID NO: | TGGA |
| | | WB4 | 202) | TTAT |
| | | | | CCCA |
| | | | | AAAT |
| | | | | TGAA |
| | | | | GGGA |
| | | | | ACTA |
| | | | | CAAC |
| | | | | (SEQ |
| | | | | ID |
| | | | | NO: |
| | | | | 36) |
| Cas13a10 | LweCas13a | Listeria | WP_036059185.1 | GATT |
| | | weihenstephanensis | (SEQ ID NO: | TAGA |
| | | FSL R9-0317 | 203) | GTAC |
| | | | | CTCA |
| | | | | AAAT |
| | | | | AGAA |
| | | | | GAGG |
| | | | | TCTA |
| | | | | AAAC |
| | | | | (SEQ |
| | | | | ID |
| | | | | NO: |
| | | | | 37) |
| Cas13a11 | LbfCas13a | Listeriaceae | WP_036091002.1 | GATT |
| | | bacterium FSL | (SEQ ID NO: | TAGA |
| | | M6-0635 | 204) | GTAC |
| | | (Listeria | | CTCA |
| | | newyorkensis) | | AAAC |
| | | | | AAAA |
| | | | | GAGG |
| | | | | ACTA |
| | | | | AAAC |
| | | | | (SEQ |
| | | | | ID |
| | | | | NO: |
| | | | | 38) |
| Cas13a12 | Lwa2cas13a | Leptotrichia | WP_021746774. | GATA |
| | | wadei F0279 | 1 (SEQ ID NO: | TAGA |
| | | | 205) | TAAC |
| | | | | CCCA |
| | | | | AAAA |
| | | | | CGAA |
| | | | | GGGA |
| | | | | TCTA |
| | | | | AAAC |
| | | | | (SEQ |
| | | | | ID |
| | | | | NO: |
| | | | | 39) |
| Cas13a13 | RcsCas13a | Rhodobacter | WP_013067728.1 | GCCT |
| | | capsulatus SB | (SEQ ID NO: | CACA |
| | | 1003 | 206) | TCAC |
| | | | | CGCC |
| | | | | AAGA |
| | | | | CGAC |
| | | | | GGCG |
| | | | | GACT |
| | | | | GAAC |
| | | | | (SEQ |
| | | | | ID |
| | | | | NO: |
| | | | | 40) |
| Cas13a14 | RcrCas13a | Rhodobacter | WP_023911507.1 | GCCT |
| | | capsulatus | (SEQ ID NO: | CACA |
| | | R121 | 207) | TCAC |
| | | | | CGCC |
| | | | | AAGA |
| | | | | CGAC |
| | | | | GGCG |
| | | | | GACT |
| | | | | GAAC |
| | | | | (SEQ |
| | | | | ID |
| | | | | NO: |
| | | | | 41) |
| Cas13a15 | RcdCas13a | Rhodobacter | WP_023911507.1 | GCCT |
| | | capsulatus | (SEQ ID NO: | CACA |
| | | DE442 | 208) | TCAC |
| | | | | CGCC |
| | | | | AAGA |
| | | | | CGAC |
| | | | | GGCG |
| | | | | GACT |
| | | | | GAAC |
| | | | | (SEQ |
| | | | | ID |
| | | | | NO: |
| | | | | 42) |

[0068] Exemplary wild type Cas13a proteins of the disclosure may comprise or consist of the amino acid sequence:

(SEQ ID NO: 43)

| | |
|---|---|
| 1 | MGNLFGHKRW YEVRDKKDFK IKRKVKVKRN |
| | YDGNKYILNI NENNNKEKID NNKFIRKYIN |
| 61 | YKKNDNILKE FTRKFHAGNI LFKLKGKEGI |
| | IRIENNDDFL ETEEVVLYIE AYGKSEKLKA |
| 121 | LGITKKKIID EAIRQGITKD DKKIEIKRQE |
| | NEEEIEIDIR DEYTNKTLND CSIILRIIEN |
| 181 | DELETKKSIY EIFKNINMSL YKIIEKIIEN |
| | ETEKVFENRY YEEHLREKLL KDDKIDVILT |
| 241 | NFMEIREKIK SNLEILGFVK FYLNVGGDKK |
| | KSKNKKMLVE KILNINVDLT VEDIADFVIK |
| 301 | ELEFWNITKR IEKVKKVNNE FLEKRRNRTY |
| | IKSYVLLDKH EKFKIERENK KDKIVKFFVE |
| 361 | NIKNNSIKEK IEKILAEFKI DELIKKLEKE |
| | LKKGNCDTEI FGIFKKHYKV NFDSKKFSKK |
| 421 | SDEEKELYKI IYRYLKGRIE KILVNEQKVR |
| | LKKMEKIEIE KILNESILSE KILKRVKQYT |
| 481 | LEHIMYLGKL RHNDIDMITV NTDDFSRLHA |
| | KEELDLELIT FFASTNMELN KIFSRENINN |
| 541 | DENIDFFGGD REKNYVLDKK ILNSKIKIIR |
| | DLDFIDNKNN ITNNFIRKFT KIGTNERNRI |
| 601 | LHAISKERDL QGTQDDYNKV INIIQNLKIS |
| | DEEVSKALNL DVVFKDKKNI ITKINDIKIS |
| 661 | EENNNDIKYL PSFSKVLPEI LNLYRNNPKN |
| | EPFDTIETEK IVLNALIYVN KELYKKLILE |
| 721 | DDLEENESKN IFLQELKKTL GNIDEIDENI |
| | IENYYKNAQI SASKGNNKAI KKYQKKVIEC |
| 781 | YIGYLRKNYE ELFDFSDFKM NIQEIKKQIK |
| | DINDNKTYER ITVKISDKTI VINDDFEYII |
| 841 | SIFALLNSNA VINKIRNRFF ATSVWLNTSE |
| | YQNIIDILDE IMQLNTLRNE CITENWNLNL |
| 901 | EEFIQKMKEI EKDFDDFKIQ TKKEIFNNYY |
| | EDIKNNILTE FKDDINGCDV LEKKLEKIVI |
| 961 | FDDETKFEID KKSNILQDEQ RKLSNINKKD |
| | LKKKVDQYIK DKDQEIKSKI LCRIIFNSDF |
| 1021 | LKKYKKEIDN LIEDMESENE NKFQEIYYPK |
| | ERKNELYIYK KNLFLNIGNP NFDKIYGLIS |
| 1081 | NDIKMADAKF LFNIDGKNIR KNKISEIDAI |
| | LKNLNDKLNG YSKEYKEKYI KKLKENDDFF |
| 1141 | AKNIQNKNYK SFEKDYNRVS EYKKIRDLVE |
| | FNYLNKIESY LIDINWKLAI QMARFERDMH |
| 1201 | YIVNGLRELG IIKLSGYNTG ISRAYPKRNG |
| | SDGFYTTTAY YKFFDEESYK KFEKICYGFG |
| 1261 | IDLSENSEIN KPENESIRNY ISHFYIVRNP |
| | FADYSIAEQI DRVSNLLSYS TRYNNSTYAS |
| 1321 | VFEVFKKDVN LDYDELKKKF KLIGNNDILE |
| | RLMKPKKVSV LELESYNSDY IKNLIIELLT |
| 1381 | KIENINDIL |

[0069] Exemplary Cas13b proteins include, but are not limited to:

| | | Cas13b |
|---|---|---|
| Species | Cas13b Accession | Size (aa) |
| Paludibacter propionicigenes WB4 | WP_013446107.1 | 1155 |
| | (SEQ ID NO: 209) | |
| Prevotella sp. P5-60 | WP_044074780.1 | 1091 |
| | (SEQ ID NO: 210) | |
| Prevotella sp. P4-76 | WP_044072147.1 | 1091 |
| | (SEQ ID NO: 211) | |
| Prevotella sp. P5-125 | WP_044065294.1 | 1091 |
| | (SEQ ID NO: 212) | |
| Prevotella sp. P5-119 | WP_042518169.1 | 1091 |
| | (SEQ ID NO: 213) | |
| Capnocytophaga canimorsus Cc5 | WP_013997271.1 | 1200 |
| | (SEQ ID NO: 214) | |
| Phaeodactylibacter xiamenensis | WP_044218239.1 | 1132 |
| | (SEQ ID NO: 215) | |
| Porphyromonas gingivalis W83 | WP_005873511.1 | 1136 |
| | (SEQ ID NO: 216) | |
| Porphyromonas gingivalis F0570 | WP_021665475.1 | 1136 |
| | (SEQ ID NO: 217) | |
| Porphyromonas gingivalis ATCC | WP_012458151.1 | 1136 |
| 33277 | (SEQ ID NO: 218) | |
| Porphyromonas gingivalis F0185 | ERJ81987.1 | 1136 |
| | (SEQ ID NO: 219) | |
| Porphyromonas gingivalis F0185 | WP_021677657.1 | 1136 |
| | (SEQ ID NO: 220) | |
| Porphyromonas gingivalis SJD2 | WP_023846767.1 | 1136 |
| | (SEQ ID NO: 221) | |
| Porphyromonas gingivalis F0568 | ERJ65637.1 | 1136 |
| | (SEQ ID NO: 222) | |
| Porphyromonas gingivalis W4087 | ERJ87335.1 | 1136 |
| | (SEQ ID NO: 223) | |
| Porphyromonas gingivalis W4087 | WP_021680012.1 | 1136 |
| | (SEQ ID NO: 224) | |
| Porphyromonas gingivalis F0568 | WP_021663197.1 | 1136 |
| | (SEQ ID NO: 225) | |
| Porphyromonas gingivalis | WP_061156637.1 | 1136 |
| | (SEQ ID NO: 226) | |
| Porphyromonas gulae | WP_039445055.1 | 1136 |
| | (SEQ ID NO: 227) | |
| Bacteroides pyogenes F0041 | ERI81700.1 | 1116 |
| | (SEQ ID NO: 228) | |
| Bacteroides pyogenes JCM 10003 | WP_034542281.1 | 1116 |
| | (SEQ ID NO: 229) | |
| Alistipes sp. ZOR0009 | WP_047447901.1 | 954 |
| | (SEQ ID NO: 230) | |
| Flavobacterium branchiophilum | WP_014084666.1 | 1151 |
| FL-15 | (SEQ ID NO: 231) | |
| Prevotella sp. MA2016 | WP_036929175.1 | 1323 |
| | (SEQ ID NO: 232) | |
| Myroides odoratimimus CCUG | EHO06562.1 | 1160 |
| 10230 | (SEQ ID NO: 233) | |
| Myroides odoratimimus CCUG | EKB06014.1 | 1158 |
| 3837 | (SEQ ID NO: 234) | |
| Myroides odoratimimus CCUG | WP_006265509.1 | 1158 |
| 3837 | (SEQ ID NO: 235) | |
| Myroides odoratimimus CCUG | WP_006261414.1 | 1158 |
| 12901 | (SEQ ID NO: 236) | |
| Myroides odoratimimus CCUG | EHO08761.1 | 1158 |
| 12901 | (SEQ ID NO: 237) | |
| Myroides odoratimimus | WP_058700060.1 | 1160 |
| (NZ_CP013690.1) | (SEQ ID NO: 238) | |
| Bergeyella zoohelcum ATCC | EKB54193.1 | 1225 |
| 43767 | (SEQ ID NO: 239) | |
| Capnocytophaga cynodegmi | WP_041989581.1 | 1219 |
| | (SEQ ID NO: 240) | |
| Bergeyella zoohelcum ATCC | WP_002664492.1 | 1225 |
| 43767 | (SEQ ID NO: 241) | |
| Flavobacterium sp. 316 | WP_045968377.1 | 1156 |
| | (SEQ ID NO: 242) | |
| Psychroflexus torquis ATCC | WP_015024765.1 | 1146 |
| 700755 | (SEQ ID NO: 243) | |
| Flavobacterium columnare ATCC | WP_014165541.1 | 1180 |
| 49512 | (SEQ ID NO: 244) | |
| Flavobacterium columnare | WP_060381855.1 | 1214 |
| | (SEQ ID NO: 245) | |
| Flavobacterium columnare | WP_063744070.1 | 1214 |
| | (SEQ ID NO: 246) | |
| Flavobacterium columnare | WP_065213424.1 | 1215 |
| | (SEQ ID NO: 247) | |
| Chryseobacterium sp. YR477 | WP_047431796.1 | 1146 |
| | (SEQ ID NO: 248) | |
| Riemerella anatipestifer ATCC | WP_004919755.1 | 1096 |
| 11845 = DSM 15868 | (SEQ ID NO: 249) | |
| Riemerella anatipestifer RA-CH-2 | WP_015345620.1 | 949 |
| Riemerella anatipestifer | WP_049354263.1 | 949 |
| | (SEQ ID NO: 250) | |
| Riemerella anatipestifer | WP_061710138.1 | 951 |
| | (SEQ ID NO: 251) | |
| Riemerella anatipestifer | WP_064970887.1 | 1096 |
| | (SEQ ID NO: 252) | |
| Prevotella saccharolytica F0055 | EKY00089.1 | 1151 |
| | (SEQ ID NO: 253) | |
| Prevotella saccharolytica JCM | WP_051522484.1 | 1152 |
| 17484 | | |
| Prevotella buccae ATCC 33574 | EFU31981.1 | 1128 |
| | (SEQ ID NO: 254) | |
| Prevotella buccae ATCC 33574 | WP_004343973.1 | 1128 |
| | (SEQ ID NO: 255) | |
| Prevotella buccae D17 | WP_004343581.1 | 1128 |
| | (SEQ ID NO: 256) | |
| Prevotella sp. MSX73 | WP_007412163.1 | 1128 |
| | (SEQ ID NO: 257) | |
| Prevotella pallens ATCC 700821 | EGQ18444.1 | 1126 |
| | (SEQ ID NO: 258) | |
| Prevotella pallens ATCC 700821 | WP_006044833.1 | 1126 |
| | (SEQ ID NO: 259) | |
| Prevotella intermedia ATCC | WP_036860899.1 | 1127 |
| 25611 = DSM 20706 | (SEQ ID NO: 260) | |
| Prevotella intermedia | WP_061868553.1 | 1121 |
| | (SEQ ID NO: 261) | |
| Prevotella intermedia 17 | AFJ07523.1 | 1135 |
| | (SEQ ID NO: 262) | |
| Prevotella intermedia | WP_050955369.1 | 1133 |
| Prevotella intermedia | BAU18623.1 | 1134 |
| | (SEQ ID NO: 263) | |
| Prevotella intermedia ZT | KJJ86756.1 | 1126 |
| | (SEQ ID NO: 264) | |
| Prevotella aurantiaca JCM 15754 | WP_025000926.1 | 1125 |
| | (SEQ ID NO: 265) | |
| Prevotella pleuritidis F0068 | WP_021584635.1 | 1140 |
| Prevotella pleuritidis JCM 14110 | WP_036931485.1 | 1117 |
| Prevotella falsenii DSM 22864 = | WP_036884929.1 | 1134 |
| JCM 15124 | (SEQ ID NO: 266) | |
| Porphyromonas gulae | WP_039418912.1 | 1176 |
| | (SEQ ID NO: 267) | |
| Porphyromonas sp. COT-052 | WP_039428968.1 | 1176 |
| OH4946 | (SEQ ID NO: 268) | |
| Porphyromonas gulae | WP_039442171.1 | 1175 |
| | (SEQ ID NO: 269) | |
| Porphyromonas gulae | WP_039431778.1 | 1176 |
| | (SEQ ID NO: 270) | |
| Porphyromonas gulae | WP_046201018.1 | 1176 |
| | (SEQ ID NO: 271) | |
| Porphyromonas gulae | WP_039434803.1 | 1176 |
| | (SEQ ID NO: 272) | |
| Porphyromonas gulae | WP_039419792.1 | 1120 |
| | (SEQ ID NO: 273) | |
| Porphyromonas gulae | WP_039426176.1 | 1120 |
| | (SEQ ID NO: 274) | |
| Porphyromonas gulae | WP_039437199.1 | 1120 |
| | (SEQ ID NO: 275) | |
| Porphyromonas gingivalis TDC60 | WP_013816155.1 | 1120 |
| | (SEQ ID NO: 276) | |
| Porphyromonas gingivalis ATCC | WP_012458414.1 | 1120 |
| 33277 | (SEQ ID NO: 277) | |
| Porphyromonas gingivalis | WP_058019250.1 | 1176 |
| A7A1-28 | (SEQ ID NO: 278) | |
| Porphyromonas gingivalis JCVI | EOA10535.1 | 1176 |
| SC001 | (SEQ ID NO: 279) | |
| Porphyromonas gingivalis W50 | WP_005874195.1 | 1176 |
| | (SEQ ID NO: 280) | |
| Porphyromonas gingivalis | WP_052912312.1 | 1176 |
| | (SEQ ID NO: 281) | |
| Porphyromonas gingivalis AJW4 | WP_053444417.1 | 1120 |
| | (SEQ ID NO: 282) | |
| Porphyromonas gingivalis | WP_039417390.1 | 1120 |
| | (SEQ ID NO: 283) | |
| Porphyromonas gingivalis | WP_061156470.1 | 1120 |
| | (SEQ ID NO: 284) | |

[0070] Exemplary wild type Bergeyella zoohelcum ATCC 43767 Cas13b (BzCas13b) proteins of the disclosure may comprise or consist of the amino acid sequence:

(SEQ ID NO: 44)

| | |
|---|---|
| 1 | menktslgnn iyynpfkpqd ksyfagyfna |
| | amentdsvfr elgkrlkgke ytsenffdai |
| 61 | fkenislvey eryvkllsdy fpmarlldkk |
| | evpikerken fkknfkgiik avrdlrnfyt |
| 121 | hkehgeveit deifgvldem lkstvltvkk |
| | kkvktdktke ilkksiekql dilcqkkley |
| 181 | lrdtarkiee krrnqrerge kelvapfkys |
| | dkrddliaai yndafdvyid kkkdslkess |
| 241 | kakyntksdp qqeegdlkip iskngvvfll |
| | slfltkqeih afkskiagfk atvideatvs |
| 301 | eatvshgkns icfmatheif shlaykklkr |
| | kvrtaeinyg eaenaeqlsv yaketlmmqm |
| 361 | ldelskvpdv vyqn1sedvg ktfiedwney |
| | lkenngdvgt meeeqvihpv irkryedkfn |
| 421 | yfairfldef aqfptlrfqv hlgnylhdsr |
| | pkenlisdrr ikekitvfgr lselehkkal |
| 481 | fikntetned rehyweifpn pnydfpkeni |
| | svndkdfpia gsildrekqp vagkigikvk |
| 541 | llnqqyvsev dkavkahqlk grkaskpsig |
| | niieeivpin esnpkeaivf ggqptaylsm |
| 601 | ndihsilyef fdkwekkkek lekkgekelr |
| | keigkelekk ivgkigagiq qiidkdtnak |
| 661 | ilkpyqdgns taidkeklik dlkqegnilq |
| | klkdeqtvre keyndfiayq dknreinkvr |
| 721 | drnhkqylkd nlkrkypeap arkevlyyre |
| | kgkvavwlan dikrfmptdf knewkgeqhs |
| 781 | llqkslayye qckeelknll pekvfqhlpf |
| | klggyfqqky lyqfytcyld krleyisglv |
| 841 | qqaenfksen kvfkkvenec fkflkkqnyt |
| | hkeldarvqs ilgypifler gfmdekptii |
| 901 | kgktfkgnea lfadwfryyk eyqnfqtfyd |
| | tenyplvele kkqadrkrkt kiyqqkkndv |
| 961 | ftllmakhif ksvfkqdsid qfsledlyqs |
| | reerlgnger arqtgerntn yiwnktvdlk |
| 1021 | lcdgkitven vklknvgdfi kyeydgrvqa |
| | flkyeeniew qaflikeske eenypyvver |
| 1081 | eiegyekvrr eellkevhli eeyilekvkd |
| | keilkkgdnq nfkyyilngl lkqlknedve |
| 1141 | sykvfnlnte pedvninqlk geatdlegka |
| | fvltyirnkf ahnqlpkkef wdycqekygk |
| 1201 | iekektyaey faevfkkeke alik |

[0071] Exemplary wild type Cas13d proteins of the disclosure may comprise or consist of the amino acid sequences:

| | |
|---|---|
| Cas13d | IEKKKSFAKGMGVKS |
| (Ruminococcus | TLVSGSKVYMTTFAE |
| flavefaciens | GSDARLEKIVEGDSI |
| XPD3002) | RSVNEGEAFSAEMAD |
| | KNAGYKIGNAKFSHP |
| | KGYAVVANNPLYTGP |
| | VQQDMLGLKETLEKR |
| | YFGESADGNDNICIQ |
| | VIHNILDIEKILAEY |
| | ITNAAYAVNNISGLD |
| | KDIIGFGKFSTVYTY |
| | DEFKDPEHHRAAFNN |
| | NDKLINAIKAQYDEF |
| | DNFLDNPRLGYFGQA |
| | FFSKEGRNYIINYGN |
| | ECYDILALLSGLAHW |
| | VVANNEEESRISRTW |
| | LYNLDKNLDNEYIST |
| | LNYLYDRITNELTNS |
| | FSKNSAANVNYIAET |
| | LGINPAEFAEQYFRF |
| | SIMKEQKNLGFNITK |
| | LREVMLDRKDMSEIR |
| | KNHKVFDSIRTKVYT |
| | MMDFVIYRYYIEEDA |
| | KVAAANKSLPDNEKS |
| | LSEKDIFVINLRGSF |
| | NDDQKDALYYDEANR |
| | IWRKLENIMHNIKEF |
| | RGNKTREYKKKDAPR |
| | LPRILPAGRDVSAFS |
| | KLMYALTMFLDGKEI |
| | NDLLTTLINKFDNIQ |
| | SFLKVMPLIGVNAKF |
| | VEEYAFFKDSAKIAD |
| | ELRLIKSFARMGEPI |
| | ADARRAMYIDAIRIL |
| | GTNLSYDELKALADT |
| | FSLDENGNKLKKGKH |
| | GMRNFIINNVISNKR |
| | FHYLIRYGDPAHLHE |
| | IAKNEAVVKFVLGRI |
| | ADIQKKQGQNGKNQI |
| | DRYYETCIGKDKGKS |
| | VSEKVDALTKIITGM |
| | NYDQFDKKRSVIEDT |
| | GRENAEREKFKKIIS |
| | LYLTVIYHILKNIVN |
| | INARYVIGFHCVERD |
| | AQLYKEKGYDINLKK |
| | LEEKGFSSVTKLCAG |
| | IDETAPDKRKDVEKE |
| | MAERAKESIDSLESA |
| | NPKLYANYIKYSDEK |
| | KAEEFTRQINREKAK |
| | TALNAYLRNTKWNVI |
| | IREDLLRIDNKTCTL |
| | FANKAVALEVARYVH |
| | AYINDIAEVNSYFQL |
| | YHYIMQRIIMNERYE |
| | KSSGKVSEYFDAVND |
| | EKKYNDRLLKLLCVP |
| | FGYCIPRFKNLSIEA |
| | LFDRNEAAKFDKEKK |
| | SGNS |
| | (SEQ ID NO: 45) |
| Cas13d | MKRQKTFAKRIGIKS |
| (contig e- | TVAYGQGKYAITTFG |
| k87_11092736) | KGSKAEIAVRSADPP |
| | EETLPTESDATLSIH |
| | AKFAKAGRDGREFKC |
| | GDVDETRIHTSRSEY |
| | ESLISNPAESPREDY |
| | LGLKGTLERKFFGDE |
| | YPKDNLRIQIIYSIL |
| | DIQKILGLYVEDILH |
| | FVDGLQDEPEDLVGL |
| | GLGDEKMQKLLSKAL |
| | PYMGFFGSTDVFKVT |
| | KKREERAAADEHNAK |
| | VFRALGAIRQKLAHF |
| | KWKESLAIFGANANM |
| | PIRFFQGATGGRQLW |
| | NDVIAPLWKKRIERV |
| | RKSFLSNSAKNLWVL |
| | YQVFKDDTDEKKKAR |
| | ARQYYHFSVLKEGKN |
| | LGFNLTKTREYFLDK |
| | FFPIFHSSAPDVKRK |
| | VDTFRSKFYAILDFI |
| | IYEASVSVANSGQMG |
| | KVAPWKGAIDNALVK |
| | LREAPDEEAKEKIYN |
| | VLAASIRNDSLFLRL |
| | KSACDKFGAEQNRPV |
| | FPNELRNNRDIRNVR |
| | SEWLEATQDVDAAAF |
| | VQLIAFLCNFLEGKE |
| | INELVTALIKKFEGI |
| | QALIDLLRNLEGVDS |
| | IRFENEFALFNDDKG |
| | NMAGRIARQLRLLAS |
| | VGKMKPDMTDAKRVL |
| | YKSALEILGAPPDEV |
| | SDEWLAENILLDKSN |
| | NDYQKAKKTVNPFRN |
| | YIAKNVITSRSFYYL |
| | VRYAKPTAVRKLMSN |
| | PKIVRYVLKRLPEKQ |
| | VASYYSAIWTQSESN |
| | SNEMVKLIEMIDRLT |
| | TEIAGFSFAVLKDKK |
| | DSIVSASRESRAVNL |
| | EVERLKKLTTLYMSI |
| | AYIAVKSLVKVNARY |
| | FIAYSALERDLYFFN |
| | EKYGEEFRLHFIPYE |
| | LNGKTCQFEYLAILK |
| | YYLARDEETLKRKCE |
| | ICEEIKVGCEKHKKN |
| | ANPPYEYDQEWIDKK |
| | KALNSERKACERRLH |
| | FSTHWAQYATKRDEN |
| | MAKHPQKWYDILASH |
| | YDELLALQATGWLAT |
| | QARNDAEHLNPVNEF |
| | DVYIEDLRRYPEGTP |
| | KNKDYHIGSYFEIYH |
| | YIRQRAYLEEVLAKR |
| | KEYRDSGSFTDEQLD |
| | KLQKILDDIRARGSY |
| | DKNLLKLEYLPFAYN |
| | LPRYKNLTTEALFDD |
| | DSVSGKKRVAEWRER |
| | EKTREAEREQRRQR |
| | (SEQ ID NO: 46) |
| Cas13d | GTGAGAAGTCTCCTT |
| (contig e- | ATGGGGAGATGCTAC |
| k87_11092736) | (SEQ ID NO:47) |
| Direct | |
| Repeat Sequence | |
| Cas13d | MKNSVTFKLIQAQEN |
| (160582958_ | KEAARKKAKDIAEQA |
| gene4983 | RIAKRNGVVKKEENR |
| 4) | INRIQIEIQTQKKSN |
| | TQNAYHLKSLAKAAG |
| | VKSVFAIGNDLLMTG |
| | FGPGNDATIEKRVFQ |
| | NRAIETLSSPEQYSA |
| | EFQNKQFKIKGNIKV |
| | LNHSTQKMEEIQTEL |
| | QDNYNRPHFDLLGCK |
| | NVLEQKYFGRTFSDN |
| | IHVQIAYNIMDIEKL |
| | LTPYINNIIYTLNEL |
| | MRDNSKDDFFGCDSH |
| | FSVAYLYDELKAGYS |
| | DRLKTKPNLSKNIDR |
| | IWNNFCNYMNSDSGN |
| | TEARLAYFGELFYKP |
| | KETGDAKSDYKTHLS |
| | NNQKEEWELKSDKEV |
| | YNIFAILCDLRHFCT |
| | HGESITPSGKPFPYN |
| | LEKNLFPEAKQVLNS |
| | LFEEKAESLGAEAFG |
| | KTAGKTDVSILLKVF |
| | EKEQASQKEQQALLK |
| | EYYDFKVQKTYKNMG |
| | FSIKKLREAIMEIPD |
| | AAKFKDDLYSSLRHK |
| | LYGLFDFILVKHFLD |
| | TSDSENLQNNDIFRQ |
| | LRACRCEEEKDQVYR |
| | SIAVKVWEKVKKKEL |
| | NMFKQVVVIPSLSKD |
| | ELKQMEMTKNTELLS |
| | SIETISTQASLFSEM |
| | IFMMTYLLDGKEINL |
| | LCTSLIEKFENIASF |
| | NEVLKSPQIGYETKY |
| | TEGYAFFKNADKTAK |
| | ELRQVNNMARMTKPL |
| | GGVNTKCVMYNEAAK |
| | ILGAKPMSKAELESV |
| | FNLDNHDYTYSPSGK |
| | KIPNKNFRNFIINNV |
| | ITSRRFLYLIRYGNP |
| | EKIRKIAINPSIISF |
| | VLKQIPDEQIKRYYP |
| | PCIGKRTDDVTLMRD |
| | ELGKMLQSVNFEQFS |
| | RVNNKQNAKQNPNGE |
| | KARLQACVRLYLTVP |
| | YLFIKNMVNINARYV |
| | LAFHCLERDHALCFN |
| | SRKLNDDSYNEMANK |
| | FQMVRKAKKEQYEKE |
| | YKCKKQETGTAHTKK |
| | IEKLNQQIAYIDKDI |
| | KNMHSYTCRNYRNLV |
| | AHLNVVSKLQNYVSE |
| | LPNDYQITSYFSFYH |
| | YCMQLGLMEKVSSKN |
| | IPLVESLKNEANDAQ |
| | SYSAKKTLEYFDLIE |
| | KNRTYCKDFLKALNA |
| | PFSYNLPRFKNLSIE |
| | ALFDKNIVYEQADLK |
| | KE (SEQ ID NO:48) |
| Cas13d | GAACTACACCCCTCT |
| (160582958_ | GTTCTTGTAGGGGTC |
| gene4983 | TAACAC |
| 4) Direct Repeat | (SEQ IDNO: 49) |
| Sequence | |
| Cas13d (contig | MKKQKSKKTVSKTSG |
| tpg \|DJXD01000002.1\|; | LKEALSVQGTVIMTS |
| uncultivated | FGKGNMANLSYKIPS |
| Ruminococcus | SQKPQNLNSSAGLKN |
| assembly, UBA7013, | VEVSGKKIKFQGRHP |
| from sheep gut | KIATTDNPLFKPQPG |
| metagenome) | MDLLCLKDKLEMHYF |
| | GKTFDDNIHIQLIYQ |
| | ILDIEKILAVHVNNI |
| | VFTLDNVLHPQKEEL |
| | TEDFIGAGGWRINLD |
| | YQTLRGQTNKYDRFK |
| | NYIKRKELLYFGEAF |
| | YHENERRYEEDIFAI |
| | LTLLSALRQFCFHSD |
| | LSSDESDHVNSFWLY |
| | QLEDQLSDEFKETLS |
| | ILWEEVTERIDSEFL |
| | KTNTVNLHILCHVFP |
| | KESKETIVRAYYEFL |
| | IKKSFKNMGFSIKKL |
| | REIMLEQSDLKSFKE |
| | DKYNSVRAKLYKLFD |
| | FIITYYYDHHAFEKE |
| | ALVSSLRSSLTEENK |
| | EEIYIKTARTLASAL |
| | GADFKKAAADVNAKN |
| | IRDYQKKANDYRISF |
| | EDIKIGNTGIGYFSE |
| | LIYMLTLLLDGKEIN |
| | DLLTTLINKFDNIIS |
| | FIDILKKLNLEFKFK |
| | PEYADFFNMTNCRYT |
| | LEELRVINSIARMQK |
| | PSADARKIMYRDALR |
| | ILGMDNRPDEEIDRE |
| | LERTMPVGADGKFIK |
| | GKQGFRNFIASNVIE |
| | SSRFHYLVRYNNPHK |
| | TRTLVKNPNVVKFVL |
| | EGIPETQIKRYFDVC |
| | KGQEIPPTSDKSAQI |
| | DVLARIISSVDYKIF |
| | EDVPQSAKINKDDPS |
| | RNFSDALKKQRYQAI |
| | VSLYLTVMYLITKNL |
| | VYVNSRYVIAFHCLE |
| | RDAFLHGVTLPKMNK |
| | KIVYSQLTTHLLTDK |
| | NYTTYGHLKNQKGHR |
| | KWYVLVKNNLQNSDI |
| | TAVSSFRNIVAHISV |
| | VRNSNEYISGIGELH |
| | SYFELYHYLVQSMIA |
| | KNNWYDTSHQPKTAE |
| | YLNNLKKHHTYCKDF |
| | VKAYCIPFGYVVPRY |
| | KNLTINELFDRNNPN |
| | PEPKEEV |
| | (SEQ ID NO: 50) |
| Cas13d (contig | CAACTACAACCCCGT |
| tpg | AAAAATACGGGGTTC |
| \|DJXD01000002.1\|; | TGAAAC |
| uncultivated | (SEQ ID NO: 51) |
| Ruminococcus | |
| assembly, | |
| UBA7013, | |
| from sheep gut | |
| metagenome) | |
| Cas13d | SEQ ID NO: 286 |
| (Gut_metagenome_ | |
| contig6049000251) | |
| Cas13d | SEQ ID NO: 287 |
| (Gut_metagenome_ | |
| contig546000275) | |
| Cas13d | SEQ ID NO: 288 |
| (Gut_metagenome_ | |
| contig4114000374) | |
| Cas13d | SEQ ID NO: 289 |
| (Gut_metagenome_ | |
| contig721000619) | |
| Cas13d | SEQ ID NO: 290 |
| (Gut_metagenome_ | |
| contig2002000411) | |
| Cas13d | SEQ ID NO: 291 |
| (Gut_metagenome_co | |
| ntigl3552000311) | |
| Cas13d | SEQ ID NO: 292 |
| (Gut_metagenome_co | |
| ntigl0037000527) | |
| Cas13d(293.Cas13d | SEQ ID NO: 293 |
| from | |
| Gut_metagenom e_con | |
| tig238000329) | |
| Cas13d | SEQ ID NO: 294 |
| (Gut_metagenome_co | |
| ntig2643000492) | |
| Cas13d | SEQ ID NO: 295 |
| (Gut_metagenome_ | |
| contig874000057) | |
| Cas13d | SEQ ID NO: 296 |
| (Gut_metagenome_ | |
| contig4781000489) | |
| Cas13d | SEQ ID NO: 297 |
| (Gut_metagenome_ | |
| contigl2144000352) | |
| Cas13d | SEQ ID NO: 298 |
| (Gut_metagenome_ | |
| contig5590000448) | |
| Cas13d | SEQ ID NO: 299 |
| (Gut_metagenome_ | |
| contig525000349) | |
| Cas13d | SEQ ID NO: 300 |
| (Gut_metagenome_ | |
| contig7229000302) | |
| Cas13d | SEQ ID NO: 301 |
| (Gut_metagenome_ | |
| contig3227000343) | |
| Cas13d | SEQ ID NO: 302 |
| (Gut_metagenome_ | |
| contig7030000469) | |
| Cas13d | SEQ ID NO: 303 |
| (gut_metagenome_P1 | |
| 7E0k2120140920,_c87 | |
| 000043) | |
| Cas13d (Metagenomic | SEQ ID NO: 304 |
| hit (no protein | |
| accession): contig | |
| emb | |
| \|OBVH01003037.1, | |
| human gut | |
| metagenome sequence | |
| (also found in WGS | |
| contigs | |
| emb\|OBXZ01000094.1 | |
| \|and | |
| emb\|OBJF01000033.1\|)) | |
| Cas13d (Metagenomic | SEQ ID NO: 305 |
| hit (no protein | |
| accession): contig | |
| OGZC01000639.1 | |
| (human gut | |
| metagenome | |
| assembly)) | |
| Cas13d (Metagenomic | SEQ ID NO: 306 |
| hit (no protein | |
| accession): contig | |
| emb\|OHBM01000764.1 | |
| (human gut | |
| metagenome | |
| assembly)) | |
| Cas13d (Metagenomic | SEQ ID NO: 307 |
| hit (no protein | |
| accession): contig | |
| emb\|OHCP01000044.1 | |
| (human gut | |
| metagenome | |
| assembly)) | |
| Cas13d (Metagenomic | SEQ ID NO: 308 |
| hit (no protein | |
| accession): contig | |
| emb | |
| \|OGDF01008514.1\| | |
| (human gut | |
| metagenome | |
| assembly)) | |
| Cas13d (Metagenomic | SEQ ID NO: 309 |
| hit (no protein | |
| accession): contig | |
| emb\|OGPN01002610.1 | |
| (human gut | |
| metagenome | |
| assembly)) | |
| Cas13d (Metagenomic | SEQ ID NO: 310 |
| hit (no protein | |
| accession): | |
| from contig | |
| emb\|OBLI01020244 | |
| and | |
| emb\|OBLI01038679 | |
| (from pig gut | |
| metagenome)) | |
| Cas13d (Metagenomic | SEQ ID NO: 311 |
| hit (no protein | |
| accession): contig | |
| OIZX01000427.1) | |
| Cas13d (Metagenomic | SEQ ID NO: 312 |
| hit (no protein | |
| accession): contig | |
| OCTW011587266.1) | |
| Cas13d (Metagenomic | SEQ ID NO: 313 |
| hit (no protein | |
| accession): contig | |
| emb | |
| \|OGNF01009141.1) | |
| Cas13d (Metagenomic | SEQ ID NO: 314 |
| hit (no protein | |
| accession): | |
| contig | |
| emb | |
| \|OIEN01002196.11) | |
| Cas13d | SEQ ID NO: 315 |
| (Ga0129306_1000735) | |
| Cas13d | SEQ ID NO: 316 |
| (Ga0129317_1008067) | |
| Cas13d | SEQ ID NO: 317 |
| (Ga0224415_10048792) | |
| Cas13d | SEQ ID NO: 318 |
| (250twins_35838_ | |
| GL0110300) | |
| Cas13d | SEQ ID NO: 319 |
| (250twins_36050_ | |
| GL0158985) | |

[0072] The term “cell” as used herein may refer to either a prokaryotic or eukaryotic cell, optionally obtained from a subject or a commercially available source.

[0073] As used herein, the term “CRISPR” refers to Clustered Regularly Interspaced Short Palindromic Repeats (CRISPR). CRISPR may also refer to a technique or system of sequence-specific genetic manipulation relying on the CRISPR pathway. A CRISPR recombinant expression system can be programmed to cleave a target polynucleotide using a CRISPR endonuclease and a guide RNA or a combination of a crRNA and a tracrRNA. A CRISPR system can be used to cause double stranded or single stranded breaks in a target polynucleotide such as DNA or RNA. A CRISPR system can also be used to recruit proteins or label a target polynucleotide. In some aspects, CRISPR-mediated gene editing utilizes the pathways of non-homologous end-joining (NHEJ) or homologous recombination to perform the edits. These applications of CRISPR technology are known and widely practiced in the art. See, e.g., U.S. Pat. No. 8,697,359 and Hsu et al. (2014) Cell 156(6): 1262-1278.

[0074] As used herein, the term “comprising” is intended to mean that the compositions and methods include the recited elements, but do not exclude others. As used herein, the transitional phrase “consisting essentially of” (and grammatical variants) is to be interpreted as encompassing the recited materials or steps “and those that do not materially affect the basic and novel characteristic(s)” of the recited embodiment. Thus, the term “consisting essentially of” as used herein should not be interpreted as equivalent to “comprising.” “Consisting of” shall mean excluding more than trace elements of other ingredients and substantial method steps for administering the compositions disclosed herein. Aspects defined by each of these transition terms are within the scope of the present disclosure.

[0075] The term “encode” as it is applied to nucleic acid sequences refers to a polynucleotide which is said to “encode” a polypeptide, an mRNA, or an effector RNA if, in its native state or when manipulated by methods well known to those skilled in the art, can be transcribed and/or translated to produce the effector RNA, the mRNA, or an mRNA that can for the polypeptide and/or a fragment thereof. The antisense strand is the complement of such a nucleic acid, and the encoding sequence can be deduced therefrom.

[0076] As used herein, the term “expression” or “gene expression” refers to the process by which polynucleotides are transcribed into mRNA and/or the process by which the transcribed mRNA is subsequently translated into peptides, polypeptides, or proteins. If the polynucleotide is derived from genomic DNA, expression may include splicing of the mRNA in a eukaryotic cell. The expression level of a gene may be determined by measuring the amount of mRNA or protein in a cell or tissue sample; further, the expression level of multiple genes can be determined to establish an expression profile for a particular sample.

[0077] As used herein, the term “functional” may be used to modify any molecule, biological, or cellular material to intend that it accomplishes a particular, specified effect.

[0078] The term “gRNA target sequences” as used herein refers to the use of guide RNA sequences used to target specific genes for correction employing the CRISPR technique. Techniques of designing gRNAs and donor therapeutic polynucleotides for target specificity are well known in the art. For example, Doench, J., et al. Nature biotechnology 2014; 32(12):1262-7, Mohr, S. et al. (2016) FEBS Journal 283: 3232-38, and Graham, D., et al. Genome Biol. 2015; 16: 260. gRNA comprises or alternatively consists essentially of, or yet further consists of a fusion polynucleotide comprising CRISPR RNA (crRNA) and trans-activating CRIPSPR RNA (tracrRNA); or a polynucleotide comprising CRISPR RNA (crRNA) and trans-activating CRIPSPR RNA (tracrRNA). In some aspects, a gRNA is synthetic (Kelley, M. et al. (2016) J of Biotechnology 233 (2016) 74-83).

[0079] In some embodiments of the compositions of the disclosure, a target sequence of an RNA molecule comprises a sequence motif corresponding to the RNA binding protein and/or the RNA binding proteins and/or fusion protein thereof.

[0080] In some embodiments of the compositions and methods of the disclosure, the sequence motif is a signature of a disease or disorder.

[0081] A sequence motif of the disclosure may be isolated or derived from a sequence of foreign or exogenous sequence found in a genomic sequence, and therefore translated into an mRNA molecule of the disclosure or a sequence of foreign or exogenous sequence found in an RNA sequence of the disclosure.

[0082] A sequence motif of the disclosure may comprise or consist of a mutation in an endogenous sequence that causes a disease or disorder. The mutation may comprise or consist of a sequence substitution, inversion, deletion, insertion, transposition, or any combination thereof.

[0083] A sequence motif of the disclosure may comprise or consist of a repeated sequence. In some embodiments, the repeated sequence may be associated with a microsatellite instability (MSI). MSI at one or more loci results from impaired DNA mismatch repair mechanisms of a cell of the disclosure. A hypervariable sequence of DNA may be transcribed into an mRNA of the disclosure comprising a target sequence comprising or consisting of the hypervariable sequence.

[0084] A sequence motif of the disclosure may comprise or consist of a biomarker. The biomarker may indicate a risk of developing a disease or disorder. The biomarker may indicate a healthy gene (low or no determinable risk of developing a disease or disorder. The biomarker may indicate an edited gene. Exemplary biomarkers include, but are not limited to, single nucleotide polymorphisms (SNPs), sequence variations or mutations, epigenetic marks, splice acceptor sites, exogenous sequences, heterologous sequences, and any combination thereof.

[0085] A sequence motif of the disclosure may comprise or consist of a secondary, tertiary, or quaternary structure. The secondary, tertiary, or quaternary structure may be endogenous or naturally occurring. The secondary, tertiary, or quaternary structure may be induced or non-naturally occurring. The secondary, tertiary, or quaternary structure may be encoded by an endogenous, exogenous, or heterologous sequence.

[0086] In some embodiments of the compositions and methods of the disclosure, a target sequence of an RNA molecule comprises or consists of between 2 and 100 nucleotides or nucleic acid bases, inclusive of the endpoints. In some embodiments, the target sequence of an RNA molecule comprises or consists of between 2 and 50 nucleotides or nucleic acid bases, inclusive of the endpoints. In some embodiments, the target sequence of an RNA molecule comprises or consists of between 2 and 20 nucleotides or nucleic acid bases, inclusive of the endpoints.

[0087] In some embodiments of the compositions and methods of the disclosure, a target sequence of an RNA molecule is continuous. In some embodiments, the target sequence of an RNA molecule is discontinuous. For example, the target sequence of an RNA molecule may comprise or consist of one or more nucleotides or nucleic acid bases that are not contiguous because one or more intermittent nucleotides are positioned in between the nucleotides of the target sequence.

[0088] In some embodiments of the compositions and methods of the disclosure, a target sequence of an RNA molecule is naturally occurring. In some embodiments, the target sequence of an RNA molecule is non-naturally occurring. Exemplary non-naturally occurring target sequences may comprise or consist of sequence variations or mutations, chimeric sequences, exogenous sequences, heterologous sequences, chimeric sequences, recombinant sequences, sequences comprising a modified or synthetic nucleotide or any combination thereof.

[0089] In some embodiments of the compositions and methods of the disclosure, a target sequence of an RNA molecule binds to a guide RNA of the disclosure.

[0090] In some embodiments of the compositions and methods of the disclosure, a target sequence of an RNA molecule binds to a first RNA binding protein of the disclosure.

[0091] In some embodiments of the compositions and methods of the disclosure, a target sequence of an RNA molecule binds to a second RNA binding protein of the disclosure.

[0092] In some embodiments of the compositions and methods of the disclosure, an RNA molecule of the disclosure comprises a target sequence. In some embodiments, the RNA molecule of the disclosure comprises at least one target sequence. In some embodiments, the RNA molecule of the disclosure comprises one or more target sequence(s). In some embodiments, the RNA molecule of the disclosure comprises two or more target sequences.

[0093] In some embodiments of the compositions and methods of the disclosure, an RNA molecule of the disclosure is a naturally occurring RNA molecule. In some embodiments, the RNA molecule of the disclosure is a non-naturally occurring molecule. Exemplary non-naturally occurring RNA molecules may comprise or consist of sequence variations or mutations, chimeric sequences, exogenous sequences, heterologous sequences, chimeric sequences, recombinant sequences, sequences comprising a modified or synthetic nucleotide or any combination thereof.

[0094] In some embodiments of the compositions and methods of the disclosure, an RNA molecule of the disclosure comprises or consists of a sequence isolated or derived from a virus.

[0095] In some embodiments of the compositions and methods of the disclosure, an RNA molecule of the disclosure comprises or consists of a sequence isolated or derived from a prokaryotic organism. In some embodiments, an RNA molecule of the disclosure comprises or consists of a sequence isolated or derived from a species or strain of archaea or a species or strain of bacteria.

[0096] In some embodiments of the compositions and methods of the disclosure, the RNA molecule of the disclosure comprises or consists of a sequence isolated or derived from a eukaryotic organism. In some embodiments, an RNA molecule of the disclosure comprises or consists of a sequence isolated or derived from a species of protozoa, parasite, protist, algae, fungi, yeast, amoeba, worm, microorganism, invertebrate, vertebrate, insect, rodent, mouse, rat, mammal, or a primate. In some embodiments, an RNA molecule of the disclosure comprises or consists of a sequence isolated or derived from a human.

[0097] In some embodiments of the compositions and methods of the disclosure, the RNA molecule of the disclosure comprises or consists of a sequence derived from a coding sequence from a genome of an organism or a virus. In some embodiments, the RNA molecule of the disclosure comprises or consists of a primary RNA transcript, a precursor messenger RNA (pre-mRNA) or messenger RNA (mRNA). In some embodiments, the RNA molecule of the disclosure comprises or consists of a gene product that has not been processed (e.g. a transcript). In some embodiments, the RNA molecule of the disclosure comprises or consists of a gene product that has been subject to post-transcriptional processing (e.g. a transcript comprising a 5′cap and a 3′ polyadenylation signal). In some embodiments, the RNA molecule of the disclosure comprises or consists of a gene product that has been subject to alternative splicing (e.g. a splice variant). In some embodiments, the RNA molecule of the disclosure comprises or consists of a gene product that has been subject to removal of non-coding and/or intronic sequences (e.g. a messenger RNA (mRNA)).

[0098] In some embodiments of the compositions and methods of the disclosure, the RNA molecule of the disclosure comprises or consists of a sequence derived from a non-coding sequence (e.g. a non-coding RNA (ncRNA)). In some embodiments, the RNA molecule of the disclosure comprises or consists of a ribosomal RNA. In some embodiments, the RNA molecule of the disclosure comprises or consists of a small ncRNA molecule. Exemplary small RNA molecules of the disclosure include, but are not limited to, microRNAs (miRNAs), small interfering (siRNAs), piwi-interacting RNAs (piRNAs), small nucleolar RNAs (snoRNAs), small nuclear RNAs (snRNAs), extracellular or exosomal RNAs (exRNAs), and small Cajal body-specific RNAs (scaRNAs). In some embodiments, the RNA molecule of the disclosure comprises or consists of a long ncRNA molecule. Exemplary long RNA molecules of the disclosure include, but are not limited to, X-inactive specific transcript (Xist) and HOX transcript antisense RNA (HOTAIR).

[0099] In some embodiments of the compositions and methods of the disclosure, the RNA molecule of the disclosure contacted by a composition of the disclosure in an intracellular space. In some embodiments, the RNA molecule of the disclosure contacted by a composition of the disclosure in a cytosolic space. In some embodiments, the RNA molecule of the disclosure contacted by a composition of the disclosure in a nucleus. In some embodiments, the RNA molecule of the disclosure contacted by a composition of the disclosure in a vesicle, membrane-bound compartment of a cell, or an organelle.

[0100] In some embodiments of the compositions and methods of the disclosure, the RNA molecule of the disclosure contacted by a composition of the disclosure in an extracellular space.

[0101] In some embodiments, the RNA molecule of the disclosure contacted by a composition of the disclosure in an exosome. In some embodiments, the RNA molecule of the disclosure contacted by a composition of the disclosure in a liposome, a polymersome, a micelle or a nanoparticle. In some embodiments, the RNA molecule of the disclosure contacted by a composition of the disclosure in an extracellular matrix. In some embodiments, the RNA molecule of the disclosure contacted by a composition of the disclosure in a droplet. In some embodiments, the RNA molecule of the disclosure contacted by a composition of the disclosure in a microfluidic droplet.

[0102] In some embodiments of the compositions and methods of the disclosure, a RNA molecule of the disclosure comprises or consists of a single-stranded sequence. In some embodiments, the RNA molecule of the disclosure comprises or consists of a double-stranded sequence. In some embodiments, the double-stranded sequence comprises two RNA molecules. In some embodiments, the double-stranded sequence comprises one RNA molecule and one DNA molecule. In some embodiments, including those wherein the double-stranded sequence comprises one RNA molecule and one DNA molecule, compositions of the disclosure selectively bind and, optionally, selectively cut the RNA molecule.

[0103] The term “intein” refers to a class of protein that is able to excise itself and join the remaining portion(s) of the protein via protein splicing. A “split intein” comes from two genes. A non-limiting example of a “split-intein” are the C-intein and N-intein sequences originally derived from N. punctiforme.

[0104] The term “isolated” as used herein refers to molecules or biologicals or cellular materials being substantially free from other materials.

[0105] As used herein, the terms “nucleic acid sequence” and “polynucleotide” are used interchangeably to refer to a polymeric form of nucleotides of any length, either ribonucleotides or deoxyribonucleotides. Thus, this term includes, but is not limited to, single-, double-, or multi-stranded DNA or RNA, genomic DNA, cDNA, DNA-RNA hybrids, or a polymer comprising purine and pyrimidine bases or other natural, chemically or biochemically modified, non-natural, or derivatized nucleotide bases.

[0106] The term “ortholog” is used in reference of another gene or protein and intends a homolog of said gene or protein that evolved from the same ancestral source. Orthologs may or may not retain the same function as the gene or protein to which they are orthologous. Non-limiting examples of Cas9 orthologs include S. aureus Cas9 (“spCas9”), S. thermophiles Cas9, L. pneumophilia Cas9, N. lactamica Cas9, N. meningitides Cas9, B. longum Cas9, A. muciniphila Cas9, and O. laneus Cas9.

[0107] The term “expression control element” as used herein refers to any sequence that regulates the expression of a coding sequence, such as a gene. Exemplary expression control elements include but are not limited to promoters, enhancers, microRNAs, post-transcriptional regulatory elements, polyadenylation signal sequences, and introns. Expression control elements may be constitutive, inducible, repressible, or tissue-specific, for example. A “promoter” is a control sequence that is a region of a polynucleotide sequence at which initiation and rate of transcription are controlled. It may contain genetic elements at which regulatory proteins and molecules may bind such as RNA polymerase and other transcription factors. In some embodiments, expression control by a promoter is tissue-specific. Non-limiting exemplary promoters include CMV, CBA, CAG, Cbh, EF-1a, PGK, UBC, GUSB, UCOE, hAAT, TBG, Desmin, MCK, C5-12, NSE, Synapsin, PDGF, MecP2, CaMKII, mGluR2, NFL, NFH, nβ2, PPE, ENK, EAAT2, GFAP, MBP, and U6 promoters. An “enhancer” is a region of DNA that can be bound by activating proteins to increase the likelihood or frequency of transcription. Non-limiting exemplary enhancers and posttranscriptional regulatory elements include the CMV enhancer and WPRE.

[0108] The term “IRES” refers to an internal ribosome entry site or portion thereof of viral, prokaryotic, or eukaryotic origin. In some embodiments, an IRES is an RNA element that allows for translation initiation in a cap-independent manner. Common structural features of IRES elements are described in Gritsenko A., et al. (2017) PLoS Comput Biol 13(9): e1005734, incorporated herein by reference. “IRES-like sequences” of the fusion RNAs disclosed herein refers to sequences of synthetic origin that function in a manner of an IRES or portion thereof to control translation of a target nucleic acid in a cell. In some embodiments, the IRES is one or more of the IRES or IRES-like sequences disclosed herein. In some embodiments, the IRES is having at least 65%, at least 70%, at least 75%, at least 78%, at least 80%, at least 83%, at least 85%, at least 88%, at least 90%, at least 92%, at least 95%, at least 96%, at least 97%, at least 98%, at least 99%, or 100% sequence identity to one or more of the IRES or IRES-like sequences disclosed herein.

[0109] The term “self-cleaving peptides” or “sequences encoding self-cleaving peptides” refer to linking sequences which are used within vector constructs to incorporate sites to promote ribosomal skipping and thus to generate two polypeptides from a single promoter, such self-cleaving peptides include without limitation, T2A, and P2A peptides or sequences encoding the self-cleaving peptides.

[0110] The term “protein”, “peptide”, and “polypeptide” are used interchangeably and in their broadest sense to refer to a compound of two or more subunits of amino acids, amino acid analogs, or peptidomimetics. The subunits may be linked by peptide bonds. In another aspect, the subunit may be linked by other bonds, e.g., ester, ether, etc. A protein or peptide must contain at least two amino acids and no limitation is placed on the maximum number of amino acids which may comprise a protein's or peptide's sequence. As used herein the term “amino acid” refers to either natural and/or unnatural or synthetic amino acids, including glycine and both the D and L optical isomers, amino acid analogs and peptidomimetics.

[0111] The term “PAMmer” refers to an oligonucleotide comprising a PAM sequence that is capable of interacting with a guide nucleotide sequence-programmable RNA binding protein. Non-limiting examples of PAMmers are described in O'Connell et al. Nature 516, pages 263-266 (2014), incorporated herein by reference. A PAM sequence refers to a protospacer adjacent motif comprising about 2 to about 10 nucleotides. PAM sequences are specific to the guide nucleotide sequence-programmable RNA binding protein with which they interact and are known in the art. For example, Streptococcus pyogenes PAM has the sequence 5′-NGG-3′, where “N” is any nucleobase followed by two guanine (“G”) nucleobases. Cas9 of Francisella novicida recognizes the canonical PAM sequence 5′-NGG-3′, but has been engineered to recognize the PAM 5′-YG-3′ (where “Y” is a pyrimidine), thus adding to the range of possible Cas9 targets. The Cpf1 nuclease of Francisella novicida recognizes the PAM 5′-TTTN-3′ or 5′-YTN-3′.

[0112] As used herein, the term “recombinant expression system” refers to a genetic construct for the expression of certain genetic material formed by recombination.

[0113] As used herein, the term “RNA-binding protein” or “RBP” includes an RNA-binding protein, polypeptide, or domain thereof including without limitation, an RNA-binding portion or portions of the RNA-binding protein or polypeptide or domain. In some embodiments, an RNA-binding protein of the disclosure is a guide nucleotide sequence-programmable RNA binding protein disclosed herein. In other embodiments, an RNA-binding protein of the disclosure is a Pumilio and FBF (PUF) protein or RNA-binding portion thereof. In some embodiments, the RNA-binding protein comprises a Pumilio-based assembly (PUMBY) protein or RNA-binding portion thereof. In some embodiments, the RNA-binding protein comprises a Pentatricopeptide Repeat (PPR) motif or motifs or RNA-binding portion thereof. In some embodiments, the RNA-binding protein does not require multimerization for RNA-binding activity. In some embodiments, the RNA-binding protein is not a monomer of a multimer complex. In some embodiments, a multimer protein complex does not comprise the RNA binding protein. In some embodiments, the RNA-binding protein selectively binds to a target sequence within the RNA molecule. In some embodiments, the RNA-binding protein does not comprise an affinity for a second sequence within the RNA molecule. In some embodiments, the RNA-binding protein does not comprise a high affinity for or selectively bind a second sequence within the RNA molecule. In some embodiments, the RNA-binding protein comprises between 2 and 1300 amino acids, inclusive of the endpoints. In some embodiments, the sequence encoding the RNA-binding protein further comprises a sequence encoding a nuclear localization signal (NLS). In some embodiments, the sequence encoding a nuclear localization signal (NLS) is positioned 3′ to the sequence encoding the RNA binding protein. In some embodiments, the RNA-binding protein comprises an NLS at a C-terminus of the protein. In some embodiments, the sequence encoding the RNA-binding protein further comprises a first sequence encoding a first NLS and a second sequence encoding a second NLS. In some embodiments, the sequence encoding the first NLS or the second NLS is positioned 3′ to the sequence encoding the RNA-binding protein. In some embodiments, the RNA-binding protein comprises the first NLS or the second NLS at a C-terminus of the protein. In some embodiments, the RNA-binding protein further comprises an NES (nuclear export signal) or other peptide tag or secretory signal. In some embodiments, a fusion protein disclosed herein comprises the RNA-binding protein as a first RNA-binding protein together with a second RNA-binding protein comprising or consisting of a nuclease domain.

[0114] As used herein, the term “subject” is intended to mean any eukaryotic organism such as a plant or an animal. In some embodiments, the subject may be a mammal; in further embodiments, the subject may be a bovine, equine, feline, murine, porcine, canine, human, or rat.

[0115] As used herein, “treating” or “treatment” of a disease in a subject refers to (1) preventing the symptoms or disease from occurring in a subject that is predisposed or does not yet display symptoms of the disease; (2) inhibiting the disease or arresting its development; or (3) ameliorating or causing regression of the disease or the symptoms of the disease. As understood in the art, “treatment” is an approach for obtaining beneficial or desired results, including clinical results. For the purposes of the present technology, beneficial or desired results can include one or more, but are not limited to, alleviation or amelioration of one or more symptoms, diminishment of extent of a condition (including a disease), stabilized (i.e., not worsening) state of a condition (including disease), delay or slowing of condition (including disease), progression, amelioration or palliation of the condition (including disease), states and remission (whether partial or total), whether detectable or undetectable.

[0116] As used herein, the term “vector” intends a recombinant vector that retains the ability to infect and transduce non-dividing and/or slowly-dividing cells and integrate into the target cell's genome. A vector can be a viral vector, bacteriophage, bacterial artificial chromosome or yeast artificial chromosome. A vector can be a DNA or RNA vector. A vector can be a self-replicating extrachromosomal vector. A vector can be a DNA plasmid. The vector may be derived from or based on a wild-type virus. Aspects of this disclosure relate to an adeno-associated virus vector, an adenovirus vector, and a lentivirus vector.

[0117] The term “translation modifier protein” refers to a protein that is able to modify translation. In some embodiments, the translation modifier protein represses translation. In some embodiments, the translation modifier protein enhances translation. In some embodiments, the translation modifier protein represses translation by 1%, 2%, 5%, 10%, 15%, 20%, 25%, 35%, 50%, 75%, 80%, 85%, 90%, 95%, 97%, 98%, 99%, or 100% as compared to a control. In some embodiments, the translation modifier protein enhances translation by 1%, 2%, 5%, 10%, 15%, 20%, 25%, 35%, 50%, 75%, 80%, 85%, 90%, 95%, 97%, 98%, 99%, or 100% as compared to a control.

[0118] As used in some embodiments herein “kinase phosphorylation domain” refers to an area within a molecule, typically but not always an amino acid, that is susceptible to the chemical addition of one or more phosphate groups by a kinase enzyme. Kinases are known to regulate a number of cellular and signal transduction pathways. Sometimes, the kinase phosphorylation domain is mutated, wherein the mutation effects the functioning of the molecule.

[0119] As used in some embodiments herein “selectable marker” refers to a component of a vector. In some embodiments, a selectable marker is a type of reporter gene used to indicate the success of a transfection. There are positive selectable markers, wherein the marker provides an advantage to the host organism. There are also negative selectable markers that eliminate or stunt growth of the host organism. There are also positive and negative selectable markers that can either advantage or inhibit growth depending on the condition. Non-limiting examples or types of markers are drug-resistance markers and auxotrophic markers.

[0120] As used in some embodiments herein, “post-transcriptionally” refers to events that occur after transcription of a gene. In some embodiments, post-transcriptional modification is when an RNA primary transcript is chemically altered following transcription from a gene to produce a functional RNA molecule. Non-limiting examples of post-transcriptional modification include addition of a cap to the 5′ end of an RNA molecule, addition of a polyadenylated tail to the 3′ end of an RNA molecule, and splicing. Additional, non-limiting examples of post-transcriptional modifications include 2′-O-Methylation (2′-OMe) (2′-O-methylation occurs on the oxygen of the free 2′-OH of the ribose moiety), N6-methyladenosine (m6A), and 5-methylcytosine (m5C). In some embodiments, gene expression may be post-transcriptionally increased or up-regulated by the implementation of the compositions and methods described herein. In some embodiments, gene expression by be post-transcriptionally decreased or down-regulated by the implementation of the compositions and methods described herein.

[0121] As used herein, the term “2-component RNA targeting system” is a nucleic acid molecule encoding a 2-component RNA targeting system comprises (a) nucleic acid sequence encoding a RNA-targeted CRISPR/Cas protein or translation modifier protein fusion; and (b) a single guide RNA (sgRNA) sequence comprising: on its 5′ end, an RNA sequence (or spacer sequence) that hybridizes to or binds to a target RNA sequence; and on its 3′ end, an RNA sequence (or scaffold sequence) capable of binding to or associating with the CRISPR/Cas protein; and wherein the 2-component RNA targeting system recognizes and alters the target RNA in a cell in the absence of a PAMmer. In some embodiments, the sequences of the 2-component system are in a single vector. In some embodiments, the spacer sequence of the 2-component system is a repeat sequence selected from the group consisting of CUG, CCUG, CAG, and GGGGCC.

[0122] It is to be inferred without explicit recitation and unless otherwise intended, that when the present disclosure relates to a polypeptide, protein, polynucleotide or antibody, an equivalent or a biologically equivalent of such is intended within the scope of this disclosure. As used herein, the term “biological equivalent thereof” is intended to be synonymous with “equivalent thereof” when referring to a reference protein, antibody, polypeptide or nucleic acid, intends those having minimal homology while still maintaining desired structure or functionality. Unless specifically recited herein, it is contemplated that any polynucleotide, polypeptide, or protein mentioned herein also includes equivalents thereof. For example, an equivalent intends at least about 70% homology or identity, or at least 80% homology or identity and alternatively, or at least about 85%, or alternatively at least about 90%, or alternatively at least about 95%, or alternatively 98% percent homology or identity and exhibits substantially equivalent biological activity to the reference protein, polypeptide or nucleic acid. Alternatively, when referring to polynucleotides, an equivalent thereof is a polynucleotide that hybridizes under stringent conditions to the reference polynucleotide or its complement.

[0123] Provided herein are the polypeptide and/or polynucleotide sequences for use in gene and protein transfer and expression techniques described below. It should be understood, although not always explicitly stated that the sequences provided herein can be used to provide the expression product as well as substantially identical sequences that produce a protein that has the same biological properties. These “biologically equivalent” or “biologically active” or “equivalent” polypeptides are encoded by equivalent polynucleotides as described herein. They may possess at least 60%, or alternatively, at least 65%, or alternatively, at least 70%, or alternatively, at least 75%, or alternatively, at least 80%, or alternatively at least 85%, or alternatively at least 90%, or alternatively at least 95% or alternatively at least 98%, identical primary amino acid sequence to the reference polypeptide when compared using sequence identity methods run under default conditions. Specific polypeptide sequences are provided as examples of particular embodiments. Modifications to the sequences to amino acids with alternate amino acids that have similar charge. Additionally, an equivalent polynucleotide is one that hybridizes under stringent conditions to the reference polynucleotide or its complement or in reference to a polypeptide, a polypeptide encoded by a polynucleotide that hybridizes to the reference encoding polynucleotide under stringent conditions or its complementary strand. Alternatively, an equivalent polypeptide or protein is one that is expressed from an equivalent polynucleotide.

[0124] The nucleic acid sequences (e.g., polynucleotide sequences) disclosed herein may be codon-optimized which is a technique well known in the art. In some embodiments disclosed herein, exemplary Cas sequences, such as e.g., SEQ ID NO: 46 (Cas13d), are codon optimized for expression in human cells. Codon optimization refers to the fact that different cells differ in their usage of particular codons. This codon bias corresponds to a bias in the relative abundance of particular tRNAs in the cell type. By altering the codons in the sequence to match with the relative abundance of corresponding tRNAs, it is possible to increase expression. It is also possible to decrease expression by deliberately choosing codons for which the corresponding tRNAs are known to be rare in a particular cell type. Codon usage tables are known in the art for mammalian cells, as well as for a variety of other organisms. Based on the genetic code, nucleic acid sequences coding for, e.g., a Cas protein, can be generated. In some embodiments, such a sequence is optimized for expression in a host or target cell, such as a host cell used to express the Cas protein or a cell in which the disclosed methods are practiced (such as in a mammalian cell, e.g., a human cell). Codon preferences and codon usage tables for a particular species can be used to engineer isolated nucleic acid molecules encoding a Cas protein (such as one encoding a protein having at least 80%, at least 85%, at least 90%, at least 92%, at least 95%, at least 96%, at least 97%, at least 98%, at least 99%, or 100% sequence identity to its corresponding wild-type protein) that takes advantage of the codon usage preferences of that particular species. For example, the Cas proteins disclosed herein can be designed to have codons that are preferentially used by a particular organism of interest. In one example, an Cas nucleic acid sequence is optimized for expression in human cells, such as one having at least 70%, at least 80%, at least 85%, at least 90%, at least 92%, at least 95%, at least 98%, or at least 99% sequence identity to its corresponding wild-type or originating nucleic acid sequence. In some embodiments, an isolated nucleic acid molecule encoding at least one Cas protein (which can be part of a vector) includes at least one Cas protein coding sequence that is codon optimized for expression in a eukaryotic cell, or at least one Cas protein coding sequence codon optimized for expression in a human cell. In one embodiment, such a codon optimized Cas coding sequence has at least 80%, at least 85%, at least 90%, at least 92%, at least 95%, at least 96%, at least 97%, at least 98%, at least 99%, or 100% sequence identity to its corresponding wild-type or originating sequence. In another embodiment, a eukaryotic cell codon optimized nucleic acid sequence encodes a Cas protein having at least 85%, at least 90%, at least 92%, at least 95%, at least 96%, at least 97%, at least 98%, at least 99%, or 100% sequence identity to its corresponding wild-type or originating protein. In another embodiment, a variety of clones containing functionally equivalent nucleic acids may be routinely generated, such as nucleic acids which differ in sequence but which encode the same Cas protein sequence. Silent mutations in the coding sequence result from the degeneracy (i.e., redundancy) of the genetic code, whereby more than one codon can encode the same amino acid residue. Thus, for example, leucine can be encoded by CTT, CTC, CTA, CTG, TTA, or TTG; serine can be encoded by TCT, TCC, TCA, TCG, AGT, or AGC; asparagine can be encoded by AAT or AAC; aspartic acid can be encoded by GAT or GAC; cysteine can be encoded by TGT or TGC; alanine can be encoded by GCT, GCC, GCA, or GCG; glutamine can be encoded by CAA or CAG; tyrosine can be encoded by TAT or TAC; and isoleucine can be encoded by ATT, ATC, or ATA. Tables showing the standard genetic code can be found in various sources (see, for example, Stryer, 1988, Biochemistry, 3.sup.rd Edition, W. H. 5 Freeman and Co., NY).

[0125] “Hybridization” refers to a reaction in which one or more polynucleotides react to form a complex that is stabilized via hydrogen bonding between the bases of the nucleotide residues. The hydrogen bonding may occur by Watson-Crick base pairing, Hoogstein binding, or in any other sequence-specific manner. The complex may comprise two strands forming a duplex structure, three or more strands forming a multi-stranded complex, a single self-hybridizing strand, or any combination of these. A hybridization reaction may constitute a step in a more extensive process, such as the initiation of a PC reaction, or the enzymatic cleavage of a polynucleotide by a ribozyme.

[0126] Examples of stringent hybridization conditions include: incubation temperatures of about 25° C. to about 37° C.; hybridization buffer concentrations of about 6×SSC to about 10×SSC; formamide concentrations of about 0% to about 25%; and wash solutions from about 4×SSC to about 8×SSC. Examples of moderate hybridization conditions include: incubation temperatures of about 40° C. to about 50° C.; buffer concentrations of about 9×SSC to about 2×SSC; formamide concentrations of about 30% to about 50%; and wash solutions of about 5×SSC to about 2×SSC. Examples of high stringency conditions include: incubation temperatures of about 55° C. to about 68° C.; buffer concentrations of about 1×SSC to about 0.1×SSC; formamide concentrations of about 55% to about 75%; and wash solutions of about 1×SSC, 0.1×SSC, or deionized water. In general, hybridization incubation times are from 5 minutes to 24 hours, with 1, 2, or more washing steps, and wash incubation times are about 1, 2, or 15 minutes. SSC is 0.15 M NaCl and 15 mM citrate buffer. It is understood that equivalents of SSC using other buffer systems can be employed.

[0127] “Homology” or “identity” or “similarity” refers to sequence similarity between two peptides or between two nucleic acid molecules. Homology can be determined by comparing a position in each sequence which may be aligned for purposes of comparison. When a position in the compared sequence is occupied by the same base or amino acid, then the molecules are homologous at that position. A degree of homology between sequences is a function of the number of matching or homologous positions shared by the sequences. An “unrelated” or “non-homologous” sequence shares less than 40% identity, or alternatively less than 25% identity, with one of the sequences of the present invention.

### Fusion RNAs

[0128] In some aspects, provided herein are are fusion RNAs comprising, consisting of, or consisting essentially of: (i) a guide nucleotide sequence-programmable RNA; and (ii) one or more internal ribosome entry sites (IRES) or portion thereof. In some embodiments, the fusion RNA comprises a guide RNA and one or more IRES-like sequences which function as an IRES as disclosed herein to control translation of the target nucleic acid. In some embodiments, the guide nucleotide sequence-programmable RNA is a guide RNA (gRNA, such as a single gRNA (sgRNA) or a crisprRNA (crRNA). In some embodiments of the fusion RNA, the guide nucleotide sequence-programmable RNA is derived from a guide RNA scaffold from Steptococcus pyogenes, Staphylococcus aureus, Francisella novicida, Neisseria meningitidis, Streptococcus thermophilus, or Brevibacillus laterosporus. In some embodiments, the guide nucleotide sequence-programmable RNA scaffold is derived from the same bacterial species as the guide nucleotide sequence-programmable RNA binding protein.

[0129] In some embodiments of the fusion RNA, the guide nucleotide sequence-programmable RNA comprises a nucleotide sequence complementary to a target nucleic acid. In some embodiments, the target nucleic acid is an RNA, messenger RNA (mRNA), transfer RNA (tRNA), or ribosomal RNA (rRNA). In particular embodiments, the target nucleic acid is an mRNA.

[0130] In some embodiments, the sequence that is complementary and/or homologous to a target nucleic acid is about 8 to about 100, about 10 to about 50, about 15 to about 40, about 15 to about 30, or about 20 to about 30 nucleotides in length. In some embodiments, the sequence that is complementary and/or homologous to a target nucleic acid is about 20 nucleotides in length. In some embodiments, the sequence is about 50%, about 60%, about 70%, about 75%, about 80%, about 85%, about 90%, about 95%, about 97%, about 98%, about 99%, or about 100% homologous to the target nucleic acid. In particular embodiments, the sequence is about 90-100% homologous to the target nucleic acid. In some embodiments, the sequence that is complementary and/or homologous to a target nucleic acid in the fusion RNA is a spacer sequence.

[0131] In some embodiments of the fusion RNA, the IRES is a type I or a type II IRES. In some embodiments, the IRES is a viral IRES or a eukaryotic IRES. In some embodiments, the IRES is selected from a Poliovirus IRES, Rhinovirus IRES, Encephalomyocarditis virus IRES (EMCV-IRES), Picornavirus IRES, Foot-and-mouth disease virus IRES (FMDV-IRES), Aphthovirus IRES, Kaposi's sarcoma-associated herpesvirus IRES (KSHV-IRES), Hepatitis A IRES, Hepatitis C IRES, Classical swine fever virus IRES, Pestivirus IRES, Bovine viral diarrhea virus IRES, Friend murine leukemia IRES, Moloney murine leukemia IRES (MMLV-IRES), Rous sarcoma virus IRES, Human immunodeficiency virus IRES (HIV-IRES), Plautia stali intestine virus IRES, Cripavirus IRES, Cricket paralysis virus IRES, Triatoma virus IRES, Rhopalosiphum padi virus IRES, Marek's disease virus IRES, Fibroblast growth factor (FGF-1 IRES and FGF-2 IRES), Platelet-derived growth factor B (PDGF/c-sis IRES), Vascular endothelial growth factor (VEGF IRES), and an Insulin-like growth factor 2 (IGF-II IRES). In some embodiments, the IRES or IRES-like sequence is a portion of an IRES or IRES-like sequence.

[0132] In some embodiments of the fusion RNA, the fusion RNA further comprises a linker sequence located between the guide nucleotide sequence-programmable RNA and the IRES. In some embodiments, the fusion RNA comprises the structure 5′-[guide nucleotide sequence-programmable RNA]-[linker sequence]-[IRES]-3′. In some embodiments, the fusion RNA comprises the structure 5′-[IRES]-[linker sequence]-[guide nucleotide sequence-programmable RNA]-3′. In some embodiments, the linker sequence is about 1 to about 3, about 1 to about 5, about 1 to about 10, about 5 to about 20, about 10 to about 50, or about 50 to about 200 nucleobases in length. In some embodiments, the linker sequence RNA is not complementary to the target nucleic acid.

### Fusion Proteins

[0133] In some aspects, provided herein are compositions comprising one or more polynucleotides encoding: (i) a guide nucleotide sequence-programmable RNA binding protein; and (ii) a translation modifier protein or a biological equivalent thereof.

[0134] In some aspects, provided herein are fusion proteins comprising, consisting of, or consisting essentially of: (i) a guide nucleotide sequence-programmable RNA binding protein; and (ii) a translation modifier protein or a biological equivalent thereof.

[0135] In some embodiments, the translation modifier protein is at least one of eukaryotic translation initiation factor 4E (EIF4E) (SEQ ID NO 52-59), eukaryotic translation initiation factor 4E-binding protein (EIF4E-BP1) (SEQ ID NO 61-22), ubiquitin-associated protein 2-like (UBAP2L) (SEQ ID NO 64-71), and a biological equivalent of each thereof.

[0136] In some embodiments, the translation modifier protein is encoded by at least one of the polynucleotides in Table 2.

TABLE 2

| Protein Name | Accession |
|---|---|
| Homo sapiens RNA pseudouridylate synthase | BC032135.2 (SEQ ID NO: 94) |
| domain containing 3 (RPUSD3) | |
| Homo sapiens La ribonucleoprotein domain | BC131630.1 (SEQ ID NO: 95) |
| family, member 5 (LARP4B) | |
| Homo sapiens CDC-like kinase 1 (CLK1) | BC031549.1 (SEQ ID NO: 96) |
| Homo sapiens paternally expressed 10 | BC050659.2 (SEQ ID NO: 285) |
| (PEG10) | |
| Homo sapiens nucleolar and spindle | BC010838.1 (SEQ ID NO: 97) |
| associated protein 1 (NUSAP1) | |
| Homo sapiens BRCA2 and CDKN1A | BC009771.1 (SEQ ID NO: 98) |
| interacting protein (BCCIP) | |
| Homo sapiens La ribonucleoprotein domain | BC001460.2 (SEQ ID NO: 99) |
| family, member 1 (LARP1) | |
| Homo sapiens ribosomal protein L10a | BC006791.1 (SEQ ID NO: 100), BC011366.1 |
| (RPL10A) | (SEQ ID NO: 101) |
| Homo sapiens annexin A2 (ANXA2) | BC009564.1 (SEQ ID NO: 102) |
| Homo sapiens CDC-like kinase 2 (CLK2) | BC014067.2 (SEQ ID NO: 103) |
| Homo sapiens small inducible cytokine | BC014051.2 (SEQ ID NOD: 104) |
| subfamily E, member 1 (AIMP1) | |
| Homo sapiens THO complex 1 (THOC1) | BC010381 (SEQ ID NO: 105) |
| Homo sapiens KIAA1324 (KIAA1324) | BC125208.1 (SEQ ID NO: 106) |
| Homo sapiens decorin (DCN) | BC005322.1 (SEQ ID NO: 107) |
| Homo sapiens annexin A2 (ANXA2) | BC023990.1 (SEQ ID NO: 108) |
| Homo sapiens PRP3 pre-mRNA processing | BC001954.1 (SEQ ID NO: 109) |
| factor 3 homolog (S. cerevisiae) (PRPF3) | |
| Homo sapiens heat shock 27 kDa protein 1 | BC073768 (SEQ ID NO: 110), BC000510 |
| (HSPB1) | (SEQ ID NO: 111) |
| Synthetic construct Homo sapiens clone | HQ44869 (SEQ ID NO: 112) |
| (SFRS13A) | |
| Homo sapiens zinc finger, RAN-binding | BC039814.1 (SEQ ID NO: 113) |
| domain containing 2 (ZRANB2) | |
| Homo sapiens mitochondrial ribosomal | BC004896.2 (SEQ ID NO: 114) |
| protein L39 (MRPL39) | |
| Homo sapiens microtubule-associated protein | BC008715.2 (SEQ ID NO: 115), BC012794.2 |
| 4 (MAP4) | (SEQ ID NO: 116) |
| Homo sapiens RNA binding motif protein 4 | BC021120.1 (SEQ ID NO: 117) |
| (RBM4) | |
| Homo sapiens RNA binding motif protein 33 | BC011923.2 (SEQ ID NO: 118) |
| (RBM33) | |
| Homo sapiens nucleosome assembly protein | BC034954 (SEQ ID NO: 119) |
| 1-like 3 (NAP1L3) | |
| Homo sapiens mRNA; cDNA | AL832026 (SEQ ID NO: 120) |
| DKFZp451K134 (from clone | |
| DKFZp451K134) (ZCCHC6) | |
| Homo sapiens poly(A)-specific ribonuclease | BC112246.1 (SEQ ID NO: 121) |
| (PARN)-like domain containing 1 (PNLDC1) | |
| Homo sapiens RNA binding motif protein 38 | BC018711 (SEQ ID NO: 122) |
| (RBM38) | |
| Homo sapiens ELAV (embryonic lethal, | BC030692.1 (SEQ ID NO: 123) |
| abnormal vision, Drosophila)-like 2 (Hu | |
| antigen B) (ELAVL2) | |
| Homo sapiens heat shock protein 90 kDa | BC121062.2 (SEQ ID NO: 124) |
| alpha (cytosolic), class A member 1 | |
| (HSP90AA1) | |
| Homo sapiens CDC-like kinase 3 (CLK3) | BC019881.1 (SEQ ID NO: 125) |
| Homo sapiens metadherin (MTDH) | BC045642.1 (SEQ ID NO: 126) |
| Homo sapiens ribosomal protein S4, X-linked | BC100903.1 (SEQ ID NO: 127) |
| (RPS4X) | |
| Homo sapiens peptidylprolyl isomerase B | BC00112 (SEQ ID NO: 128) |
| (cyclophilin B) (PPIB) | |
| Homo sapiens interferon-induced protein with | BC032839.2 (SEQ ID NO: 129) |
| tetratricopeptide repeats 2 (IFIT2) | |
| Homo sapiens DiGeorge syndrome critical | BC009323.2 (SEQ ID NO: 130) |
| region gene 8 (DGCR8) | |
| Homo sapiens bol, boule-like (Drosophila) | BC033674.1 (SEQ ID NO: 131) |
| (BOLL) | |
| Homo sapiens exportin 5 (XPO5) | BC000129.1 (SEQ ID NO: 132) |
| Homo sapiens deleted in azoospermia 4 | BC047480.1 (SEQ ID NO: 133), BC047617.1 |
| (DAZ4) | (SEQ ID NO: 134) |
| Homo sapiens fragile X mental retardation, | BC020090.1 (SEQ ID NO: 135) |
| autosomal homolog 2 (FXR2) | |
| Homo sapiens KRR1, small subunit (SSU) | BC016778.1 (SEQ ID NO: 136) |
| processome component, homolog (yeast) | |
| (KRR1) | |
| Homo sapiens viral DNA polymerase- | BC018736.1 (SEQ ID NO: 137) |
| transactivated protein 6 (SPATS2L) | |
| Homo sapiens NIN1/RPN12 binding protein | BC064630.1 (SEQ ID NO: 138) |
| 1 homolog (S. cerevisiae) (NOB1) | |
| Homo sapiens GTPase activating protein | BC011731.2 (SEQ ID NO: 139) |
| (SH3 domain) binding protein 2 (G3BP2) | |
| Homo sapiens piwi-like 2 (Drosophila) | BC025995.1 (SEQ ID NO: 140) |
| (PIWIL2) | |
| Homo sapiens DEAD (Asp-Glu-Ala-Asp, | BC032128.2 (SEQ ID NO: 141) |
| (SEQ ID NO: 350)) box polypeptide 39 | |
| (DDX39A) | |
| Homo sapiens eukaryotic translation | BC126259.1 (SEQ ID NO: 142) |
| elongation factor 2 (EEF2) | |
| Homo sapiens piwi-like 1 (Drosophila) | BC028581.2 (SEQ ID NO: 143) |
| (PIWIL1) | |
| Homo sapiens bruno-like 5, RNA binding | BC028101.1 (SEQ ID NO: 144) |
| protein (Drosophila) (CELF5) | |
| Homo sapiens TNF receptor-associated | BC018950.2 (SEQ ID NO: 145) |
| protein 1 (TRAP1) | |
| Homo sapiens DEAD (Asp-Glu-Ala-Asp, | BC005162.2 (SEQ ID NO: 146), BC006544.2 |
| (SEQ ID NO: 350)) box polypeptide 19A | (SEQ ID NO: 147) |
| (DDX19A) | |
| Homo sapiens superkiller viralicidic activity | BC015758 (SEQ ID NO: 148) |
| 2-like (SKIV2L) | |
| Homo sapiens tripartite motif-containing 39 | BC007661.2 (SEQ ID NO: 149) |
| (TRIM39) | |
| Homo sapiens heterogeneous nuclear | BC002355.2 (SEQ ID NO: 150), BC009600.1 |
| ribonucleoprotein A1 (HNRNPA) | (SEQ ID NO: 151), BC012158.1 (SEQ ID |
| | NO: 152), BC033714.1 (SEQ ID NO: 153) |
| Homo sapiens piwi-like 4 (Drosophila) | BC031060.1 (SEQ ID NO: 154) |
| (PIWIL4) | |
| Homo sapiens zinc finger CCCH-type | BC027607.2 (SEQ ID NO: 155) |
| containing 14 (ZC3H14) | |
| Homo sapiens C1D nuclear receptor co- | BC005235.1 (SEQ ID NO: 156) |
| repressor (C1D) | |
| Homo sapiens RNA binding motif protein, Y- | BC030018.2 (SEQ ID NO: 157) |
| linked, family 1, member F (RBMY1F) | |
| Homo sapiens RNA binding motif (RNP1, | BC006825.1 (SEQ ID NO: 158) |
| RRM) protein 3 (RBM3) | |
| Homo sapiens RNA binding motif protein 19 | BC004289.1 (SEQ ID NO: 159), BC006137.1 |
| (RBM19) | (SEQ ID NO: 160) |
| Homo sapiens CDGSH iron sulfur domain 2 | BC032300.1 (SEQ ID NO: 161) |
| (CISD2) | |
| Homo sapiens histone cluster 1, H1c | BC002649.1 (SEQ ID NO: 162) |
| (HIST1H1C) | |
| Homo sapiens methyl CpG binding protein 2 | BC011612.1 (SEQ ID NO: 163) |
| (Rett syndrome) (MECP2) | |
| Homo sapiens heat shock 60 kDa protein 1 | BC003030.1 (SEQ ID NO: 164) |
| (chaperonin) (HSPD1) | |
| Homo sapiens YTH domain family, member | BC052970.1 (SEQ ID NO: 165) |
| 3 (YTHDF3) | |
| Homo sapiens RNA binding motif protein 42 | BC004204.2 (SEQ ID NO: 166) |
| (RBM42) | |
| Homo sapiens cytoplasmic polyadenylation | BC117150 (SEQ ID NO: 167) |
| element binding protein 4 (CPEB4) | |
| Homo sapiens YTH domain family, member | BC050284.1 (SEQ ID NO: 168) |
| 1 (YTHDF1) | |
| Homo sapiens Ewing sarcoma breakpoint | BC004817 (SEQ ID NO: 169) |
| region 1 (EWSR1) | |
| Synthetic construct Homo sapiens clone | BC148673 (SEQ ID NO: 170) |
| (PABPN1L) | |
| Homo sapiens cytoplasmic polyadenylation | BC103939.1 (SEQ ID NO: 171) |
| element binding protein 2 (CPEB2) | |
| Homo sapiens YTH domain family, member | BC002559.2 (SEQ ID NO: 172) |
| 2 (YTHDF2) | |
| Homo sapiens protein associated with | BC065264.1 (SEQ ID NO: 173), BC109038.1 |
| topoisomerase II homolog 1 (yeast) (PATL1) | (SEQ ID NO: 174) |
| Homo sapiens RNA binding motif protein 7 | BC034381.1 (SEQ ID NO: 175) |
| (RBM7) | |
| Homo sapiens zinc finger protein 36, C3H | BC005010 (SEQ ID NO: 176) |
| type-like 2 (ZFP36L2) | |
| Homo sapiens zinc finger CCCH-type | BC050463.1 (SEQ ID NO: 177) |
| containing 18 (ZC3H18) | |
| Homo sapiens CCR4-NOT transcription | BC011826 (SEQ ID NO: 178) |
| complex, subunit 2 (CNOT2) | |
| Homo sapiens DEAD (Asp-Glu-Ala-Asp, | BC065007.1 (SEQ ID NO: 179) |
| (SEQ ID NO: 350)) box polypeptide 6 | |
| (DDX6) | |
| Homo sapiens CCR4-NOT transcription | BC060852.1 (SEQ ID NO: 180) |
| complex, subunit 7 (CNOT7) | |
| Homo sapiens zinc finger protein 36 | BC018340.1 (SEQ ID NO: 181) |
| (ZFP36L1) | |
| Homo sapiens CCR4-NOT transcription | BC035590.1 (SEQ ID NO: 182) |
| complex, subunit 4 (CNOT4) | |
| Homo sapiens zinc finger protein 36, C3H | BC009693 (SEQ ID NO: 183) |
| type, homolog (mouse) (ZFP36) | |
| Homo sapiens poly(A)-specific ribonuclease | BC050029.1 (SEQ ID NO: 184) |
| (deadenylation nuclease) (PARN) | |
| Synthetic construct Homo sapiens clone | BC156179 (SEQ ID NO: 185) |
| (NANOS1) | |
| Homo sapiens small nuclear | BC000405.2 (SEQ ID NO: 186), BC008290.1 |
| ribonucleoprotein polypeptide A (SNRPA) | (SEQ ID NO: 187) |
| Synthetic construct Homo sapiens clone | DQ893993 (SEQ ID NO: 188) |
| (TOB1) | |
| Homo sapiens nanos homolog 2 (Drosophila) | BC117484.1 (SEQ ID NO: 189), BC117486.1 |
| (NANOS2) | (SEQ ID NO: 190) |
| Homo sapiens nanos homolog 3 (Drosophila) | BC101209.2 (SEQ ID NO: 191) |
| (NANOS3) | |
| Homo sapiens B-cell translocation gene 1, | BC016759 (SEQ ID NO: 192) |
| anti-proliferative (BTG1) | |
| Homo sapiens transducer of ERBB2, 2 | BC038957 (SEQ ID NO: 193) |
| (TOB2) | |
| Homo sapiens pre-mRNA processing factor 3 | ENST00000324862.7 (SEQ ID NO: 320) |
| (PRPF3) | |
| Homo sapiens RNA-binding E3 ubiquitin- | ENST00000406189.4 (SEQ ID NO: 321), |
| protein ligase (MEX3C) | ENST00000592416.1 (SEQ ID NO: 322), |
| | ENST00000616921.1 (SEQ ID NO: 323) |
| Homo sapiens family with sequence | ENST00000238823.13 (SEQ ID NO: 324), |
| similarity 98 member A (FAM98A) | ENST00000403368.1 (SEQ ID NO: 325), |
| | ENST00000431950.1 (SEQ ID NO: 326) |
| Homo sapiens terminal nucleotidyltransferase | ENST00000423041.6 (SEQ ID NO: 327), |
| 2 (TUT2) | ENST00000504233.5 (SEQ ID NO: 328), |
| | ENST00000296783.7 (SEQ ID NO: 329), |
| | ENST00000428308.6 (SEQ ID NO: 330), |
| | ENST00000453514.5 (SEQ ID NO: 331) |
| Homo sapiens terminal nucleotidyltransferase | ENST00000436909.7 (SEQ ID NO: 332), |
| 4B (TUT3) | ENST00000561678.5 (SEQ ID NO: 333), |
| | ENST00000357464.4 (SEQ ID NO: 334) |
| Homo sapiens terminal uridylyl transferase 4 | ENST00000528457.5 (SEQ ID NO: 335), |
| (TUT4 (ZCCHC11)) | ENST00000527941.5 (SEQ ID NO: 336), |
| | ENST00000257177.9 (SEQ ID NO: 337), |
| | ENST00000371544.7 (SEQ ID NO: 338), |
| | ENST00000494469.5 (SEQ ID NO: 339), |
| | ENST00000471623.1 (SEQ ID NO: 340), |
| | ENST00000531722.5 (SEQ ID NO: 341), |
| | ENST00000474453.6 (SEQ ID NO: 342), |
| | ENST00000528642.5 (SEQ ID NO: 343), |
| | ENST00000484723.6 (SEQ ID NO: 344), |
| | ENST00000473856.5 (SEQ ID NO: 345), |
| | ENST00000355809.4 (SEQ ID NO: 346), |
| | ENST00000470626.1 (SEQ ID NO: 347), |
| | ENST00000524582.1 (SEQ ID NO: 348) |

[0137] In some embodiments, the translation modifier protein is at least one of eukaryotic translation initiation factor 4G (EIF4G), eukaryotic translation initiation factor 4A (EIF4A), eukaryotic translation initiation factor 4B (EIF4B), eukaryotic translation initiation factor 4H (EIF4H), eukaryotic translation initiation factor 3 (EIF3), polyadenylate-binding protein 1 (PABP1), and a biological equivalent of each thereof. EIF4G and EIF3 are eukaryotic translation initiation factors involved in stabilizing preinitiation complexes by targeting 5′UTRs. PABP1 is a eukaryotic polyadenylate-binding protein which enhances circularization of messenger RNAs and promotes ribosome recycling. EIF4A, EIF4B, and EIF4H are eukaryotic helicases that unwind 5′UTR secondary structure and help preinitiation complexes find target start codons.

[0138] In some aspects, provided herein are fusion proteins comprising, consisting of, or consisting essentially of: (i) a guide nucleotide sequence-programmable RNA binding protein; and (ii) a eukaryotic translation initiation factor 4E (EIF4E) protein or a biological equivalent thereof. EIF4E is a eukaryotic translation initiation factor involved in directing ribosomes to the cap structure of mRNAs. In some embodiments, it is a 24-kD polypeptide that exists as both a free form and as part of the EIF4F pre-initiation complex. Many cellular mRNA require EIF4E in order to be translated into protein. In some embodiments, the EIF4E polypeptide is the rate-limiting component of the eukaryotic translation apparatus and is involved in the mRNA-ribosome binding step of eukaryotic protein synthesis.

[0139] In some embodiments, the guide nucleotide sequence-programmable RNA binding protein is all or part of a protein selected from: Cas9, modified Cas9, Cpf1, Cas13a, Cas13b, CasM, CasRX/Cas13d, and a biological equivalent of each thereof. In some embodiments, the guide nucleotide sequence-programmable RNA binding protein is all or part of a protein selected from: Steptococcus pyogenes Cas9 (spCas9), Staphylococcus aureus Cas9 (saCas9), Francisella novicida Cas9 (FnCas9), Neisseria meningitidis Cas9 (nmCas9), Streptococcus thermophilus CRISPR 1 Cas9 (St1Cas9), Streptococcus thermophilus CRISPR 3 Cas9 (St3Cas9), and Brevibacillus laterosporus Cas9 (BlatCas9). In some embodiments, the guide nucleotide sequence-programmable RNA binding protein is modified to be nuclease inactive.

[0140] In some embodiments, the CasRX/Cas13d protein is an effector of the type VI-D CRISPR-Cas systems. In some embodiments, the CasRX/Case13d protein is an RNA-guided RNA endonuclease enzyme that can cut or bind RNA. In some embodiments, the CasRX/Cas13d protein can include one or more higher eukaryotes and prokaryotes nucleotide-binding (HEPN) domains. In some embodiments, the CasRX/Case13d protein can include either a wild-type or mutated HEPN domain. In some embodiments, the CasRX/Case13d protein includes a mutated HEPN domain that cannot cut RNA but can process guide RNA. In some embodiments, the CasRX/Cas13d protein does not require a protospacer flanking sequence. Also see WO Publication No. WO2019/040664 & US2019/0062724, which is incorporated herein by reference in its entirety, for further examples and sequences of CasRX/Cas13d protein, without limitation, specific reference is made to SEQ ID NOS: 54, 57, 61, 67, 69, 71, 72, 73, 74, 75, 76, 77, 78, 85, 86, 87, 88, 113, 147, 153, 154, 155, 158, 160, 162, 164, 170, 179, 183, 185, 187, 189, 190, 202, 204, 206, 208, 209, 210, and 212 reproduced herein. Yan et al. (2018) Mol Cell. 70(2):327-339 (doi: 10.1016/j.molcel.2018.02.2018) and Konermann et al. (2018) Cell 173(3):665-676 (doi: 10.1016/j.cell/2018.02.033) have described CasRX/Cas13d proteins and both of which are incorporated by reference herein in their entireties. Also see WO Publication Nos. WO2018/183703 (CasM) and WO2019/006471 (Cas13d), which are incorporated herein by reference in their entirety.

[0141] In some embodiments of the fusion proteins of the disclosure, an RNA-binding protein or RNA-binding portion thereof which is a PUF (Pumilio and FBF homology family) can be used in place of the guide nucleotide sequence-programmable RNA binding protein. The unique RNA recognition mode of PUF proteins (named for Drosophila Pumilio and C. elegans fem-3 binding factor) that are involved in mediating mRNA stability and translation are well known in the art. The PUF domain of human Pumiliol, also known in the art, binds tightly to cognate RNA sequences and its specificity can be modified. It contains eight PUF repeats that recognize eight consecutive RNA bases with each repeat recognizing a single base. Since two amino acid side chains in each repeat recognize the Watson-Crick edge of the corresponding base and determine the specificity of that repeat, a PUF domain can be designed to specifically bind most 8-nt RNA. Wang et al., Nat Methods. 2009; 6(11): 825-830. See also WO2012/068627 which is incorporated by reference herein in its entirety.

[0142] In some embodiments of the fusion proteins of the disclosure, the RNA-binding protein or RNA-binding portion thereof which is a PUMBY (Pumilio-based assembly) protein can be used in the place of the guide nucleotide sequence-programmable RNA binding protein. RNA-binding protein PumHD (Pumilio homology domain, a member of the PUF family), which has been widely used in native and modified form for targeting RNA, has been engineered to yield a set of four canonical protein modules, each of which targets one RNA base. These modules (i.e., Pumby, for Pumilio-based assembly) can be concatenated in chains of varying composition and length, to bind desired target RNAs. The specificity of such Pumby—RNA interactions is high, with undetectable binding of a Pumby chain to RNA sequences that bear three or more mismatches from the target sequence. Katarzyna et al., PNAS, 2016; 113(19): E2579-E2588. See also US 2016/0238593 which is incorporated by reference herein in its entirety.

[0143] In some embodiments of the compositions of the disclosure, the RNA-binding protein or RNA-binding portion thereof which is a PPR protein can be used in place of the guide nucleotide sequence-programmable RNA binding protein disclosed herein. PPR proteins (proteins with pentatricopeptide repeat (PPR) motifs derived from plants) are nuclear-encoded and exclusively controlled at the RNA level organelles (chloroplasts and mitochondria), cutting, translation, splicing, RNA editing, genes specifically acting on RNA stability. PPR proteins are typically a motif of 35 amino acids and have a structure in which a PPR motif is about 10 contiguous amino acids. The combination of PPR motifs can be used for sequence-selective binding to RNA. PPR proteins are often comprised of PPR motifs of about 10 repeat domains. PPR domains or RNA-binding domains may be configured to be catalytically inactive. WO 2013/058404 incorporated herein by reference in its entirety.

[0144] In some embodiments, the guide nucleotide sequence-programmable RNA binding protein is bound to the fusion RNA. In some embodiments, the nucleic acid sequences encoding the RNA binding protein and the fusion RNA sequence are comprised within a single vector. In some embodiments, the nucleic acid sequences encoding the RNA binding protein and the fusion RNA sequence are comprised within two vectors.

[0145] In some embodiments, the fusion protein further comprises, consists of, or consists essentially of a linker. In some embodiments, the linker is a peptide linker. In some embodiments, the peptide linker comprises one or more repeats of the tri-peptide GGS. In other embodiments, the linker is a non-peptide linker. In some embodiments, the non-peptide linker comprises polyethylene glycol (PEG), polypropylene glycol (PPG), co-poly(ethylene/propylene) glycol, polyoxyethylene (POE), polyurethane, polyphosphazene, polysaccharides, dextran, polyvinyl alcohol, polyvinylpyrrolidones, polyvinyl ethyl ether, polyacryl amide, polyacrylate, polycyanoacrylates, lipid polymers, chitins, hyaluronic acid, heparin, or an alkyl linker.

[0146] In some embodiments, the fusion protein comprises, consists of, or consists essentially of the structure NH₂-[EIF4E]-[linker]-[guide nucleotide sequence-programmable RNA binding protein]-COOH. In other embodiments, the fusion protein comprises, consists of, or consists essentially of the structure NH₂-[guide nucleotide sequence-programmable RNA binding protein]-[linker]-[EIF4E]-COOH.

[0147] In some embodiments, the guide nucleotide sequence-programmable RNA binding protein is bound to a guide RNA (gRNA) such as a single gRNA (sgRNA), a crisprRNA (crRNA), and/or a trans-activating crRNA (tracrRNA). In some embodiments, the sequence encoding the guide nucleotide sequence-programmable RNA binding protein and the gRNA is a 2-component system. In some embodiments, the 2-component system is comprised within a single vector.

[0148] In some embodiments, the EIF4E protein is encoded by a polynucleotide having a sequence comprising, consisting of, or consisting essentially of all or part of a sequence selected from SEQ ID NO: 52, SEQ ID NO: 53, SEQ ID NO: 54, SEQ ID NO: 55, and a biological equivalent of each thereof.

| | |
|---|---|
| (NM_001130678) | GAGTATTGCCTTTGGCCCCCACCCCCACGGGTCCCCGCGCTCCGTCTTCCT |
| Homo sapiens | TCTGACTGGGGGACTCCGCGGGACGGCGTTCCCGGCGCGCACTGTACCCC |
| eukaryotic | TTGCCGCCCCTTCCCCTTCATGTTGGACCTGACCTCCCGCGGACAAGTGG |
| translation initiation | GGACGTCCCGGAGGATGGCCGAGGCGGCGTGTAGCGCACACTTTCTGGA |
| factor 4E (EIF4E), | AACCACCCCTACTCCTAATCCCCCGACTACAGAAGAGGAGAAAACGGAA |
| transcript variant 3 | TCTAATCAGGAGGTTGCTAACCCAGAACACTATATTAAACATCCCCTACA |
| | GAACAGATGGGCACTCTGGTTTTTTAAAAATGATAAAAGCAAAACTTGG |
| | CAAGCAAACCTGCGGCTGATCTCCAAGTTTGATACTGTTGAAGACTTTTG |
| | GGCTCTGTACAACCATATCCAGTTGTCTAGTAATTTAATGCCTGGCTGTG |
| | ACTACTCACTTTTTAAGGATGGTATTGAGCCTATGTGGGAAGATGAGAAA |
| | AACAAACGGGGAGGACGATGGCTAATTACATTGAACAAACAGCAGAGAC |
| | GAAGTGACCTCGATCGCTTTTGGCTAGAGACACTTCTGTGCCTTATTGGA |
| | GAATCTTTTGATGACTACAGTGATGATGTATGTGGCGCTGTTGTTAATGTT |
| | AGAGCTAAAGGTGATAAGATAGCAATATGGACTACTGAATGTGAAAACA |
| | GAGAAGCTGTTACACATATAGGGAGGGTATACAAGGAAAGGTTAGGACT |
| | TCCTCCAAAGATAGTGATTGGTTATCAGTCCCACGCAGACACAGCTACTA |
| | AGAGCGGCTCCACCACTAAAAATAGGTTTGTTGTTTAAGAAGACACCTTC |
| | TGAGTATTCTCATAGGAGACTGCGTCAAGCAATCGAGATTTGGGAGCTGA |
| | ACCAAAGCCTCTTCAAAAAGCAGAGTGGACTGCATTTAAATTTGATTTCC |
| | ATCTTAATGTTACTCAGATATAAGAGAAGTCTCATTCGCCTTTGTCTTGTA |
| | CTTCTGTGTTCATTTTTTTTTTTTTTTTTGGCTAGAGTTTCCACTATCCCAA |
| | TCAAAGAATTACAGTACACATCCCCAGAATCCATAAATGTGTTCCTGGCC |
| | CACTCTGTAATAGTTCAGTAGAATTACCATTAATTACATACAGATTTTAC |
| | CTATCCACAATAGTCAGAAAACAACTTGGCATTTCTATACTTTACAGGAA |
| | AAAAAATTCTGTTGTTCCATTTTATGCAGAAGCATATTTTGCTGGTTTGAA |
| | AGATTATGATGCATACAGTTTTCTAGCAATTTTCTTTGTTTCTTTTTACAG |
| | CATTGTCTTTGCTGTACTCTTGCTGATGGCTGCTAGATTTTAATTTATTTGT |
| | TTCCCTACTTGATAATATTAGTGATTCTGATTTCAGTTTTTCATTTGTTTTG |
| | CTTTTGTTTTTTTCCTCATGTAACATTGGTGAAGGATCCAGGAATATGACA |
| | CAAAGGTGGAATAAACATTAATTTTGTGCATTCTTTGGTAATTTTTTTTGT |
| | TTTTTGTAACTACAAAGCTTTGCTACAAATTTATGCATTTCATTCAAATCA |
| | GTGATCTATGTTTGTGTGATTTCCTAAACATAATTGTGGATTATAAAAAA |
| | TGTAACATCATAATTACATTCCTAACTAGAATTAGTATGTCTGTTTTTGTA |
| | TCTTTATGCTGTATTTTAACACTTTGTATTACTTAGGTTATTTTGCTTTGGT |
| | TAAAAATGGCTCAAGTAGAAAAGCAGTCCCATTCATATTAAGACAGTGT |
| | ACAAAACTGTAAATAAAATGTGTACAGTGAATTGTCTTTTAGACAACTAG |
| | ATTTGTCCTTTTATTTCTCCATCTTTATAGAAGGAATTTGTACTTCTTATTG |
| | CAAGGCAGTCTCTATATTATGTCTTCTTTTGTGGTGTCTTCCATGTGAACA |
| | GCATAAGTTTGGAGCACTAGTTTGATTATTATGTTTATTACAATTTTTAAT |
| | AAATTGAATAGGTAGTATCATATATATGGAATTAAATTGATGTGGCTATC |
| | TTTGTTTTTTTATAAAGTAAGGCACAGTCATTCAGTCTTAGGTAAATAATG |
| | TACTCTCTTAATATGTTAATACTCATGAGAATTGGGATCTGATGCATCAC |
| | CATTTGATTGGTAGCAACAGTGGTTGTAAAACTTGGTTGCTGAATTGAGT |
| | TGTTTCTATGTTAAGTGTCAAAATGATAGTGTAGGGAAAGTACAGGTGGT |
| | GGGGACATATGCATTAAGAATCTTGTTAGTGTTGCAATCTAAATAGAATG |
| | GAATAAACAGGTGTTAAGACATATTTATAGTGGTAAATTGTTGTAGTATG |
| | GTATTCTGTAAACTTGAAAACTTGATCTACTCTTTGTAGGTATCATTTGAA |
| | AGCAAACTTGAAAATGTTTTGTACATAGTACATACTTGTATAGTCCTGTG |
| | AGATGAAGTATGGCTATCAGACCAAAGGATAAGCCAAACTGTAGGTAGC |
| | AGAATGGAAATTATTATTTTGAGAGGAAAATTTGTCTTTGAATGGTGATT |
| | ATGACTTAATCATTTTAAAACTGATAAACTTGACAAAAACCCTGTATGAA |
| | ATAAACATGAAATTAATAGCACTGATTTCATTGTAAAATTTTAAAGCAGT |
| | TTAAAGGGTACCACAGGTTATCACAGTACTCTCAATGCCACAAACACCTC |
| | TTGTTCAGTATTCTAGAAATACTGAATCAGAATTCTGTGTTTATTATAATC |
| | TCAGCATACTGTACATAATATCTGCTAGTTAAACTTGGGTAATTGGTTAA |
| | GGTGACTTACTGTCTATGTCAATATGTATAGTTTTGAGTACTTCAAGAGTT |
| | TACTTAAAAGTGATGATGTTACTGGTATGTTGGCAGTGGGTGGGACTGAA |
| | GTAGTGTATCTATTATAAATTGATCTATTTTCTTAATTCTAAGATGAAGTC |
| | CAATTTTAAGCATCAGCTTTTAGGTGCAAAGGAGGAATTAACACATTAAA |
| | TGTATACAGTTCTAAATTTTTGAAATAACTGATGTGTAGCATTTGATTATT |
| | GGTATTACCATTTTAGAATCATGATGTTATTTTAAACCTTTTTCCTGGGGA |
| | CAAGAAAGGATAATAAATTACGCTGAATCACTTTTGGCAGTTGCCACTTA |
| | AATAGTACAGTGACTTGCAACTTTTATAACTTTATCAGCATCTTCTCTAAA |
| | TACAAAATTAGGCTATATGTTATTTTCCAACTTACTGTTTTCTCTCTGTTT |
| | AGCAGGATATTATAAATAGATTAAATAGATATATTTTCTTTTTTTTTTTTT |
| | TTTTTTGAGACGGAGTCTCGCTTTGTCTCCCAGGCTGGAGTGCAGTGGCG |
| | TGATCTCCCAGTAGCTGGGACTACAAGCACCTGCCACCATGCCCGGCTAA |
| | TTTTTTTTGTATTTTTAGTAGAGACGGGGTTTCACTGTGTTAGCCAAGATG |
| | GTCTCAATCTCCTGACTTTGTGATCTGCCTGCTTCTGCCTCCCAAAGTGCT |
| | GGGATTACAGGTGTGAGCCACCGTACCCAGCCCAAATAGATGTATTTTCA |
| | TAATAGAGAATTGAAATAGGCTTTAATGGGTGAATAGCAGTTTATTGTAG |
| | GCATGTGACATTTCATTTAATGAATTTAAAGTTTATTATCCCAATTCTACA |
| | GAAGGATTTAATGCATACTATGCAATTAAATAATTATAACACTACATAGT |
| | AATAATTTATGTGCCAGGCAGTAGTTCAGTCACTTTACATGCTTATTAAC |
| | CTGCAGAATAATCTTTTGAGATGTAGGTGCTGTTACTGAGAATTTAACTT |
| | TTGCTTGTAAATTGCAAAGGGTGGATTTGAATTCTGGAAATTTGGTTCCA |
| | GAGACAATAATTACATAACACTTTCTCCATAGGGTACAGCCTGTCTAATA |
| | GGCTATAGTAAATCACCTCAGCTTGTTATAGGTCGGGCATGCAAACATTT |
| | CTCCATTTTACTCCCTTTGGTAATGAATCTAGTAATAGATGGAAATTTTCC |
| | CTAGATTCACTGTGTTAGTCAGTTGGGGAAGTTTGGAGGCAAAGATACAG |
| | GAGTTTATGGGGAGGTAGTGTACATAAATATAATCATATGCTATATAAGG |
| | AAGTTTTGGTCAGCAGCAGACCATATATAGGATGGTGGGCCAGTAACATT |
| | GTAACACTGTATTTTTACTGTATCTTTTCCATGTTTTGTTATGTTTAGATAC |
| | ACAAATAACATTATGGAGTATTCAGTATGGTAACATGCCATACAGGTTTG |
| | TAGCCTAGGAGCAGTAATAGACTGTTCCCTGAAACCTATATTTGTGGTAG |
| | GTTTATACCATTCAGGTTTGTGTAAGTACACAACGAAATCATCTAATGGC |
| | CCATTTCTCAAAACATATTCCCATCATTAATCAATGCATGGTCATGTTTTC |
| | GTATACATTTTAAGCTTCTGTATTCTAATCTAATATAAATGGCAAAATATT |
| | CAAACTGATAGGCATTGAGATTCTTAAATGCTAAAGTTGCATTCAAAAGG |
| | ATAATTTTAGGCGTTGTGACAAAGCAGTGTTATATTTTAAAGTTAGTGAC |
| | AAGGCTATGCACCTTTTATCTCTAATTGTTTCTTACAGAATGTTTTTATTA |
| | TTGAGTAGTAAAACAATAAATGTCAGATCCTTTATACAAATTCAAGATTG |
| | ACATTGATAAACAAAACTTCAGCATATCACTCAAGGTCAGCGTAGAAATT |
| | GTGTGTCTGGAAACTTCTATAGTAATTTTATATTACTGTGACATTAGTATG |
| | TGATCACTTTTCTAGTAATGTTTTAAAAAAATATATCTTACAGGCCAGGC |
| | ATAGTGCTTTATGCCTGTAATCCCAGCACTTTGGGAGGCCAAGGTGGCAG |
| | GATTGCATGAGTCCAGGAGTTCAACACCAGTCTGGGCAATAAAGTGAGA |
| | CCCCATCGCTACAAACAAATTAAAAAATATTTATGTATGTGTGTAATATA |
| | TATAATATATAACAAAACACATATGTATGTGTATATATAGTATGTCTGGC |
| | AGAGTACAATTTAGGGGTTAAGACTGGTCCCTCACATATGGTGTGAGAA |
| | ACACTGTTCACAGGTTGCTTTCCCCATTAGCCCAGGGCAACTCATTTGCC |
| | CATCATTTCCTAGAACAACCGGGTCTGTTACGTCTACAGTTTTCATCTTCA |
| | TGCAGTTATGGATTTGGTGTCAAAAACTTTGGTCCTGTTCTCTACCATCTT |
| | AAAATAAACTCTTGTGTCCTGCTTTACTATGAATTGCAAAGTAGGCATTA |
| | GGTAGCCTTCCTACTACCATAGTTTAGAGTTCAATATTCTTATGACCATTC |
| | TACTGGTAGAAGCAAAAAATGAACTTGTAGGCATGTGATCACATGTGCCT |
| | ATGGTGCTGTCTTTTCCAGTACAGGGGAACTAATTTTCATATTTTAATCTT |
| | GCAGCTTTTTGTTTACTTCATGCATTGTGATTTCTCATAGTTTTGCACAGA |
| | ACTCACTTCCCTACCTTTTCTGAAACAAAAGTATGTATACACACATACAT |
| | ATGTATTGAGCACCTCTATTTACTGTGTTCCACGTGCTGGGCATATAGCA |
| | AGAACAGAATGGTCTGGGGCCCTGCTCTAAAGAAGATTTAAAAGCAAAC |
| | ATATATTAAAAATGCGTGAGTCTGGCCAGGAGCAGTGGCTCATGCCTGCA |
| | ACCCCAGCACTTTGGGAGGCTGAAGCGGGTGAATCACCTGAGATCAGGA |
| | GTTGAGACCAGCCTGGCCAACATGGTGAAACCCCGTCTCTACTAAAAATA |
| | CAAAAATTAGCCTGGCATGGTGGCATGCGCCTGTAATTCCAGCTACTTTG |
| | GAGACTGAGACAGGAGAATCACTTGAGCCCAGGAAGTGGAGGTTGCAGT |
| | GAGCTGAGATCGCGCCACTGCACTCCAGCCTGGGTGACAGAGCAAGACT |
| | CCATCTCAAAAAAAAAAAAAAAACGTGTCTGTTCATAAGGTTCTACAAA |
| | TAGCTGTTGTTACAGAAAATAGGACTAGGGTTTTATTACTGGGGATTATG |
| | CAGTCGAGGTAAATATAAAATGAGGTTGTTTCTTCTTTTTTTTATTTGAGA |
| | CAGAGTCTTGTTTGCCAGGCTGGAGTGCAGTGGCGTGCTCTTAGCTCCGC |
| | CTCCCGGGATCAAACGATTCTCTTGCCTCAGCCTCTCGAGTAGCTGGGAC |
| | TACAGGCGCGTGCCACCACACCCAGCTGATTTTTGTATTTTTAGTAGAGA |
| | TGGGATTTCACCATGATGGCCAGGATGGTCTCGATCTTTTGACCTCATGA |
| | TCCACCCACCTCGGCCTCCCAAAGTGCTGGGATTACAGGCGTGAGCCACT |
| | GCACCCGGCCCTGGTTCTAAATACTCTTCCAGCTCTAAAACATTGATTCT |
| | AAACAGATCACATTCCAGGAGGACTCTAGCAAACCAGCATATGCAAATT |
| | ATAGCTTTTGCAAGACCGTTTCTACTTTTATATTACTGAACTCTATATGAT |
| | TGTCCAAGTAAAGTTTTGTGTCTCTTTGATTATTTGATTGTACTTTAAAAT |
| | TTTTTCACCATTCATTTAACATTTTTTACCATACTGTAGTATTTTTAATGCA |
| | ATTGTGTTTGCATTGGTGTGGCTTTAGAGGCTTCTCCAACCACCTTCCCAA |
| | AATACTGATCTGTGATTTTTTTCTTTAATGTTTGGCCAAACATAATACATG |
| | CTTATTTTATTTTTCATCCCTACAGAAAGGTAGAAGATGAGAATTCTGTCT |
| | CCTACTGTTGTTTTTCAAGGTGCCACTCAAATTTCTTGTACGTGTCTAGAA |
| | ACTTGTGCATACAATAGAAGTACACTGTGGCTGGGCATGGTGGCTCATGC |
| | CTGTAATCCCAGCACTTTGTGAAGCTGAGGTGGGTGGATCACCTGAGGTC |
| | AGGGAGTTTGAGACCAGCCTGGCCAACATGATGAAACCCCGTCTTTACTA |
| | AAATTAGAAAAAATTAGCCAGGCGTGGTGGTGTGCGCCTGTAATCCCAG |
| | CTACTCGGGAGGCTGAGGCATGAGAATCACTTGAACTCGGGTGGCAGAG |
| | GCTGCAGTGAGCTGAGATCATGCCACTGCATTCCAGCCTGCGCAGCTGAG |
| | CCAGACTCCATCTCCAAAAAAAAAAAAAAAAAAAAAAAAAGATGTCCA |
| | ATATATGTAACTTTTTTCTTTGGACACAAAAATTCCATTAGCTTTGTTTTC |
| | TCATTTTTACTTGTCATGATGTATGTCGAACACATTATTTTTAGTGTCTGG |
| | TGTTCCATTATACAGATGTCTCTCTTGTTGGTTGAATTTTTGCATTCACAG |
| | ACCCTCAAGTTGGATTCATATCTTTTTACACTAAGCATAAAGAAGACGGA |
| | TTGGGGTCGGGTATGGTGGCTCACGCCTGTAATCCCAGCACTTCGGGAGG |
| | CTGAGGTGGGCGGATCACGAGGTCAGGAGTTCGAGACCAGCCTGGCCAA |
| | CATACTGAAACCCCGTCTCTAAAAATATGAAAAAAAAATTAGCCAGGCG |
| | TGGTGGTGCGCAGCTGTAGCCCCAGCTACTTGGGAGGCTGAGGCAGGAG |
| | AATCACTTGAACCCAGGAGGTGGAGGTTGCAGTGAGCATATTGCACCATT |
| | GCATTCCAGCCTGCACGACAGAGGAAGACGCCATTTCAAAAAAAAAAAA |
| | AAAAAGACGGATTGATTTTCTTCAGCAGTATCAAGTGGCACTTACCATCC |
| | ACCCCTTTAACACCCAAACCATTCTAATCCATGTATACAGACCATCATCT |
| | GTTTCGTTATTGTGTTCTATAATGCAGCTTTGCGAGTTATGCAGTTTTGGT |
| | CCTCATGATATTTTTCTGATTGGTTTTTAATGTATTTTGTTCTAACGAGCC |
| | AACATTGTTATACATGTAATTTGTTTATTTGCTAGATTGTACTCTTTCCCA |
| | AAGATGGGCTATGAACTAGCATCTACTTTCATTTTACCTATTTACCTGTAA |
| | ACATTGAAAAAACTGAATCAAATGCAGTGATATCGGACCTAGTTTTATTG |
| | TTATGCCTTATAATGAATTTAACTTCACAGTTTTCTAAATGAGAGCATTTC |
| | CCAAAGACATCTTTATGGTCATAACCAGTTTCCCTTGGCATTTGATTTATT |
| | TTTATTTTTATTTATTTATCTTTTTGAGAAGGAGTTTCGCTCTTGTTGCCCA |
| | GGCTAGAGTGCAATGGCGTGATCTCGGGTCACTGCAACCTCTGCCTCCCG |
| | GGTTCAAGCGATTCTCCTGCCTCAGCCTCCAAGTAGCTGGGATTACAGGC |
| | ATGCACCACCACGCCCGACTAATTTGTATTTTTAGAGACGGGGTTTCTCC |
| | GTGTTGGTCAGGCTGGTCTCAAACTTCCAACCTCAGGTGATCCGCCCGCC |
| | GTGGCCTCCCAAAGTGTTGGGATTACAGGCGTGAGCCACAGTGTCTGGCC |
| | TGATTTGTTTTTAAGAGCATTATTTTTCTGCTTTATTTTGTGACTTCAACAT |
| | TTGACACAATTTTGGGTGAATGGTTTGTGCATGGTGCCTGACATCGTGTTT |
| | TGATGTGTAGTATATGCCATAGGACATGTGAGACAAGATATGTCCCAACT |
| | TGACCTTGTTTTGTATTGTTTATGTCAAGGTGTTGAGTGTATTAGATATAC |
| | TGTTGGGGCTCTGTGTTCTAGCTCTGCCTTTTAGATAATAACCATGGTTAA |
| | ATATTGCAATGTCCTGCATGTCTCCACACATGGGTTTTGTAACTGAGTCA |
| | GAATGATAAGTGATTAGTAAGCACATTTTTTCTCCTTTCAGGAAACCACT |
| | ATTTTCCTTTTCTACATGCTGTTTTGTAAGTAGTACTTTTATGAAGGTTGT |
| | CTTCAAATGTTCGCATCTTCCATTTCTACTGCCCTTGGGTTATCCATCCTG |
| | TCATTTTGTGCCAATCACTTTTTTTTTTAACTTTTAAGTTCAGGGATGAAA |
| | GTGTAGATTTGTTACATAGGTAAACTTGTGTCATGGGGTTGTTGTACAGA |
| | TTATTTCATCACCCAGGTGTTAAGCCTAGTATGCACTAGTTGTTTTTCCTG |
| | ATCCTCTCCCTGCTCCCACCCTCCACCCTCTGATAGGCCCCAGTGTGTGTT |
| | GTTCCCCTCTGTGTGTCCATGTGTTCTCATCATTTAGCTCCCACTTACAAG |
| | TGAGAATGTGGTGTTTGGTTTTCTGTTCCTGCATTAGTTTGCTAAGGATAA |
| | TGGCCTCGAGCTCCATCCAAGTCCCTGTAAAGGACATGATCTTGTACTTT |
| | TTTATGGCTGCATAGTATTCTGTGGTGTATATGTACCACATTTTCTTTATC |
| | CAGTCTATCATTAGGCATTTAGGTTGATTCCATGTTTTTGCTATTGTGAAT |
| | AGTGCTGCAATGAACATACATGTGCATGTCTTTTTATAATAGAATGATTT |
| | ATATTCTGTTGTGTATATACCCAGTAATGGGATTGCTGAGTTGAATGCTA |
| | TTTCTGCCTTTAGGTCTTTGATGAATTGCCACACTGTCTTCCACAATGGTT |
| | GAACTAATTTACACTCCCACCAACGGTGAATAAGTGTTCACTTTTCTCCA |
| | CAACCTTGTCAGCATCTATTATTTTTTGACTTTTTAGTAATAGCCATTCTG |
| | ACTGCTCACATCTATTTTGTAAATAAAGTTTTATTGAAACATGGCCTTACC |
| | CATTTGTTTACATATATTCATGGCTGTTTTTGTGCCACAATGTCAGAGTTG |
| | TCTTAAAGTAGACAGAGACTATCTGGCTGTAAAGCCTGAGATATATACTA |
| | ACTGGTTCTTTATGTAAAAAGTTTGCTGACCACCTACTCTAAACGTTTTGC |
| | AGTGATGGTAGTGTTGGCAAAAAACCAAATAGCTTACCCTCTTTAAATTT |
| | CCCTTTTACTTCTTACAAACTCCTAACACCATTTACGACTTTGTCATCAAT |
| | ATGGTCAACTAAGCTTGGTTTGCATGGCTCTACTTCCTTTCACCTTCCACT |
| | TAGGCAGTGTCTCCAAGTCCACTGCAGTTTCTATTTGTCTCCTGACTGTTA |
| | CTGTATCAGTTCTTACCTAAATAACATAACAACTGATCTCCCTACTTTTTG |
| | CCTATGCCCTCAAATGTGCTCATTGTTGATCTATCTCCCTGTTAGGTGTTC |
| | TTTTTCTCCTCTTTAGAAAGCAGCCAAGGAAACCAGGGTTCTCTCAAAGT |
| | GGAAAATACTGGAACTTATGTACTGTTATCATAATGATAGTTGGTGTTTT |
| | GAATTATAAGAATGATTCCAGGTGGTTTCTAAATCATCCAATAAAGCTGT |
| | ATTCACTCTGTAAAAAAAAAAA (SEQ ID NO: 52) |
| (NM_001130679) | AGGCACAGGCAGCCTGCATACACTCCTTTTCCTGGTGTCAACATTATTTA |
| Homo sapiens | AAAGCATGGGAAATAGTAATGAGACAGTGTCTTCTTCATTAGAACCTTAG |
| eukaryotic | GAGTCTACTAGATTTCTTCATCTCTATTTGTTGTTATTAGTAGCCAAACTG |
| translation initiation | TGCAAAAAACACGGTCTTGAGAAATGACAGCACAGTATCTTAGAGGGAA |
| factor 4E (EIF4E), | AGGAAATGTAGGATGCCAGTGTGGGGACAAATTTCTGATTGCCAGTGATT |
| transcript variant 2 | GTTGTGAGCATAACAATAATTTCATGAACATTAAAGCCTCTATTGAGGGC |
| | AGCTGCAGTTGTAAAGGAAAAAAAATGGTCCTGAACATTTAAAACTACA |
| | CTGGTGTACATCATAATCAAACAAAGTAAACAGAAAAAAATTTAAACTT |
| | TGCTAAAAAAAAAAAGCAGAAGCACTTGATCTTTAGGAAGGCACGCAGT |
| | TGCTTATTATGAATCATTTCTAGAGTCCGATGCATTTTCAAAGCCGGTTAC |
| | AGTCATTACGAAGCACACCCTTGTGAGGTAAGTGTATCATCACCTTTGGT |
| | TCATAAATAAAAAAGCTGAGACGCCGAGCGATTAAGTCACTCGCCTAAG |
| | GAGAATGAGTCAACGTCAAGAGTCATAGTTGACCCGGCCTAAAGACTCC |
| | AGACCATCAGTCCAGGGCTTAGTCAGCGGGGCCCGGAGTGGCTTCCCTG |
| | GCTGGCATCTGGACTTAGGCTATTTCCGTGCACGTAAAAGCGGAATATTG |
| | GAACGGTTGCACAGAACTTCCAAATAATTTTTACCGCCACGCAAGATTTA |
| | GCCCTGAGGTCTTAATCTCAGGATTTGGGACAGTAAAAGCTGTCGTCCCT |
| | CCCCCTCGTCCAGCCGGTGGCAAGCGGGTACTGCGGGCGGTTCCGTCCGT |
| | CCCCTTTCGCAGAAATGGCAACGAATGACCACCAGCATTAGCTGAGCCA |
| | GGGGACGTGGGAGGGTTGATTGCCTAAACGACTCTGCATCGCCGCCTCTT |
| | TTTGAAACTAAGAGAAAATGGTGGGAGATCAAAAGAAAACTAAATAAAC |
| | ACACAGGCAACTTGTCCTGGGACCTCAACTAAGCAAATGAAGCCTTATTG |
| | TGTGTGCTGAGCCTGCAGTTCCCAACCTTCCGGGGAAGATGGGAGGACA |
| | GGGCGACAAAGGGCACAGTAGGCTTGCCTGGCAGTAAGTGTGACCGCAG |
| | CTATCCAGGCGGAAGAGCAGAGGACTGAAACCACCCTCCAGCAAGCGAG |
| | TGTCCGCCGCGTTGAGAACCGCGCACCCTACCCATCGGCCACGTGACCAG |
| | TCCTTTTTAAAAAAAATTTCTTTACCTTAAAAAAAAAAAAAAAAAAAAG |
| | GTGGGGGAGAGACTCCACTTCCCAGAAGCCTCTCGTTACTCACGCAGCCG |
| | CAGTCTTGCGCAGGTGCCGCCAGGGCCAAACGGACATATCCGTCACGTG |
| | GCCAGAAGCTGGCCAATCCGGTTTGAATCTCATTTTTTTCCTCTTACCCCC |
| | CCTTCTGGAGCGGTTGTGCGATCAGATCGATCTAAGATGGCGACTGTCGA |
| | ACCGGAAACCACCCCTACTCCTAATCCCCCGACTACAGAAGAGGAGAAA |
| | ACGGAATCTAATCAGGAGGTTGCTAACCCAGAACACTATATTAAACATCC |
| | CCTACAGAACAGATGGGCACTCTGGTTTTTTAAAAATGATAAAAGCAAA |
| | ACTTGGCAAGCAAACCTGCGGCTGATCTCCAAGTTTGATACTGTTGAAGA |
| | CTTTTGGGCTCTGTACAACCATATCCAGTTGTCTAGTAATTTAATGCCTGG |
| | CTGTGACTACTCACTTTTTAAGGATGGTATTGAGCCTATGTGGGAAGATG |
| | AGAAAAACAAACGGGGAGGACGATGGCTAATTACATTGAACAAACAGC |
| | AGAGACGAAGTGACCTCGATCGCTTTTGGCTAGAGACAAGATGGGATCT |
| | TGCTATGTTGCCCAGGTTGGTCTCAAACTTCTGGCCTCAAGTGATCCTCCC |
| | ACTTCAGCCTCCCAAAGTGCTGGAATTACAGCTTCTGTGCCTTATTGGAG |
| | AATCTTTTGATGACTACAGTGATGATGTATGTGGCGCTGTTGTTAATGTTA |
| | GAGCTAAAGGTGATAAGATAGCAATATGGACTACTGAATGTGAAAACAG |
| | AGAAGCTGTTACACATATAGGGAGGGTATACAAGGAAAGGTTAGGACTT |
| | CCTCCAAAGATAGTGATTGGTTATCAGTCCCACGCAGACACAGCTACTAA |
| | GAGCGGCTCCACCACTAAAAATAGGTTTGTTGTTTAAGAAGACACCTTCT |
| | GAGTATTCTCATAGGAGACTGCGTCAAGCAATCGAGATTTGGGAGCTGA |
| | ACCAAAGCCTCTTCAAAAAGCAGAGTGGACTGCATTTAAATTTGATTTCC |
| | ATCTTAATGTTACTCAGATATAAGAGAAGTCTCATTCGCCTTTGTCTTGTA |
| | CTTCTGTGTTCATTTTTTTTTTTTTTTTTGGCTAGAGTTTCCACTATCCCAA |
| | TCAAAGAATTACAGTACACATCCCCAGAATCCATAAATGTGTTCCTGGCC |
| | CACTCTGTAATAGTTCAGTAGAATTACCATTAATTACATACAGATTTTAC |
| | CTATCCACAATAGTCAGAAAACAACTTGGCATTTCTATACTTTACAGGAA |
| | AAAAAATTCTGTTGTTCCATTTTATGCAGAAGCATATTTTGCTGGTTTGAA |
| | AGATTATGATGCATACAGTTTTCTAGCAATTTTCTTTGTTTCTTTTTACAG |
| | CATTGTCTTTGCTGTACTCTTGCTGATGGCTGCTAGATTTTAATTTATTTGT |
| | TTCCCTACTTGATAATATTAGTGATTCTGATTTCAGTTTTTCATTTGTTTTG |
| | CTTTTGTTTTTTTCCTCATGTAACATTGGTGAAGGATCCAGGAATATGACA |
| | CAAAGGTGGAATAAACATTAATTTTGTGCATTCTTTGGTAATTTTTTTTGT |
| | TTTTTGTAACTACAAAGCTTTGCTACAAATTTATGCATTTCATTCAAATCA |
| | GTGATCTATGTTTGTGTGATTTCCTAAACATAATTGTGGATTATAAAAAA |
| | TGTAACATCATAATTACATTCCTAACTAGAATTAGTATGTCTGTTTTTGTA |
| | TCTTTATGCTGTATTTTAACACTTTGTATTACTTAGGTTATTTTGCTTTGGT |
| | TAAAAATGGCTCAAGTAGAAAAGCAGTCCCATTCATATTAAGACAGTGT |
| | ACAAAACTGTAAATAAAATGTGTACAGTGAATTGTCTTTTAGACAACTAG |
| | ATTTGTCCTTTTATTTCTCCATCTTTATAGAAGGAATTTGTACTTCTTATTG |
| | CAAGGCAGTCTCTATATTATGTCTTCTTTTGTGGTGTCTTCCATGTGAACA |
| | GCATAAGTTTGGAGCACTAGTTTGATTATTATGTTTATTACAATTTTTAAT |
| | AAATTGAATAGGTAGTATCATATATATGGAATTAAATTGATGTGGCTATC |
| | TTTGTTTTTTTATAAAGTAAGGCACAGTCATTCAGTCTTAGGTAAATAATG |
| | TACTCTCTTAATATGTTAATACTCATGAGAATTGGGATCTGATGCATCAC |
| | CATTTGATTGGTAGCAACAGTGGTTGTAAAACTTGGTTGCTGAATTGAGT |
| | TGTTTCTATGTTAAGTGTCAAAATGATAGTGTAGGGAAAGTACAGGTGGT |
| | GGGGACATATGCATTAAGAATCTTGTTAGTGTTGCAATCTAAATAGAATG |
| | GAATAAACAGGTGTTAAGACATATTTATAGTGGTAAATTGTTGTAGTATG |
| | GTATTCTGTAAACTTGAAAACTTGATCTACTCTTTGTAGGTATCATTTGAA |
| | AGCAAACTTGAAAATGTTTTGTACATAGTACATACTTGTATAGTCCTGTG |
| | AGATGAAGTATGGCTATCAGACCAAAGGATAAGCCAAACTGTAGGTAGC |
| | AGAATGGAAATTATTATTTTGAGAGGAAAATTTGTCTTTGAATGGTGATT |
| | ATGACTTAATCATTTTAAAACTGATAAACTTGACAAAAACCCTGTATGAA |
| | ATAAACATGAAATTAATAGCACTGATTTCATTGTAAAATTTTAAAGCAGT |
| | TTAAAGGGTACCACAGGTTATCACAGTACTCTCAATGCCACAAACACCTC |
| | TTGTTCAGTATTCTAGAAATACTGAATCAGAATTCTGTGTTTATTATAATC |
| | TCAGCATACTGTACATAATATCTGCTAGTTAAACTTGGGTAATTGGTTAA |
| | GGTGACTTACTGTCTATGTCAATATGTATAGTTTTGAGTACTTCAAGAGTT |
| | TACTTAAAAGTGATGATGTTACTGGTATGTTGGCAGTGGGTGGGACTGAA |
| | GTAGTGTATCTATTATAAATTGATCTATTTTCTTAATTCTAAGATGAAGTC |
| | CAATTTTAAGCATCAGCTTTTAGGTGCAAAGGAGGAATTAACACATTAAA |
| | TGTATACAGTTCTAAATTTTTGAAATAACTGATGTGTAGCATTTGATTATT |
| | GGTATTACCATTTTAGAATCATGATGTTATTTTAAACCTTTTTCCTGGGGA |
| | CAAGAAAGGATAATAAATTACGCTGAATCACTTTTGGCAGTTGCCACTTA |
| | AATAGTACAGTGACTTGCAACTTTTATAACTTTATCAGCATCTTCTCTAAA |
| | TACAAAATTAGGCTATATGTTATTTTCCAACTTACTGTTTTCTCTCTGTTT |
| | AGCAGGATATTATAAATAGATTAAATAGATATATTTTCTTTTTTTTTTTTT |
| | TTTTTTGAGACGGAGTCTCGCTTTGTCTCCCAGGCTGGAGTGCAGTGGCG |
| | TGATCTCCCAGTAGCTGGGACTACAAGCACCTGCCACCATGCCCGGCTAA |
| | TTTTTTTTGTATTTTTAGTAGAGACGGGGTTTCACTGTGTTAGCCAAGATG |
| | GTCTCAATCTCCTGACTTTGTGATCTGCCTGCTTCTGCCTCCCAAAGTGCT |
| | GGGATTACAGGTGTGAGCCACCGTACCCAGCCCAAATAGATGTATTTTCA |
| | TAATAGAGAATTGAAATAGGCTTTAATGGGTGAATAGCAGTTTATTGTAG |
| | GCATGTGACATTTCATTTAATGAATTTAAAGTTTATTATCCCAATTCTACA |
| | GAAGGATTTAATGCATACTATGCAATTAAATAATTATAACACTACATAGT |
| | AATAATTTATGTGCCAGGCAGTAGTTCAGTCACTTTACATGCTTATTAAC |
| | CTGCAGAATAATCTTTTGAGATGTAGGTGCTGTTACTGAGAATTTAACTT |
| | TTGCTTGTAAATTGCAAAGGGTGGATTTGAATTCTGGAAATTTGGTTCCA |
| | GAGACAATAATTACATAACACTTTCTCCATAGGGTACAGCCTGTCTAATA |
| | GGCTATAGTAAATCACCTCAGCTTGTTATAGGTCGGGCATGCAAACATTT |
| | CTCCATTTTACTCCCTTTGGTAATGAATCTAGTAATAGATGGAAATTTTCC |
| | CTAGATTCACTGTGTTAGTCAGTTGGGGAAGTTTGGAGGCAAAGATACAG |
| | GAGTTTATGGGGAGGTAGTGTACATAAATATAATCATATGCTATATAAGG |
| | AAGTTTTGGTCAGCAGCAGACCATATATAGGATGGTGGGCCAGTAACATT |
| | GTAACACTGTATTTTTACTGTATCTTTTCCATGTTTTGTTATGTTTAGATAC |
| | ACAAATAACATTATGGAGTATTCAGTATGGTAACATGCCATACAGGTTTG |
| | TAGCCTAGGAGCAGTAATAGACTGTTCCCTGAAACCTATATTTGTGGTAG |
| | GTTTATACCATTCAGGTTTGTGTAAGTACACAACGAAATCATCTAATGGC |
| | CCATTTCTCAAAACATATTCCCATCATTAATCAATGCATGGTCATGTTTTC |
| | GTATACATTTTAAGCTTCTGTATTCTAATCTAATATAAATGGCAAAATATT |
| | CAAACTGATAGGCATTGAGATTCTTAAATGCTAAAGTTGCATTCAAAAGG |
| | ATAATTTTAGGCGTTGTGACAAAGCAGTGTTATATTTTAAAGTTAGTGAC |
| | AAGGCTATGCACCTTTTATCTCTAATTGTTTCTTACAGAATGTTTTTATTA |
| | TTGAGTAGTAAAACAATAAATGTCAGATCCTTTATACAAATTCAAGATTG |
| | ACATTGATAAACAAAACTTCAGCATATCACTCAAGGTCAGCGTAGAAATT |
| | GTGTGTCTGGAAACTTCTATAGTAATTTTATATTACTGTGACATTAGTATG |
| | TGATCACTTTTCTAGTAATGTTTTAAAAAAATATATCTTACAGGCCAGGC |
| | ATAGTGCTTTATGCCTGTAATCCCAGCACTTTGGGAGGCCAAGGTGGCAG |
| | GATTGCATGAGTCCAGGAGTTCAACACCAGTCTGGGCAATAAAGTGAGA |
| | CCCCATCGCTACAAACAAATTAAAAAATATTTATGTATGTGTGTAATATA |
| | TATAATATATAACAAAACACATATGTATGTGTATATATAGTATGTCTGGC |
| | AGAGTACAATTTAGGGGTTAAGACTGGTCCCTCACATATGGTGTGAGAA |
| | ACACTGTTCACAGGTTGCTTTCCCCATTAGCCCAGGGCAACTCATTTGCC |
| | CATCATTTCCTAGAACAACCGGGTCTGTTACGTCTACAGTTTTCATCTTCA |
| | TGCAGTTATGGATTTGGTGTCAAAAACTTTGGTCCTGTTCTCTACCATCTT |
| | AAAATAAACTCTTGTGTCCTGCTTTACTATGAATTGCAAAGTAGGCATTA |
| | GGTAGCCTTCCTACTACCATAGTTTAGAGTTCAATATTCTTATGACCATTC |
| | TACTGGTAGAAGCAAAAAATGAACTTGTAGGCATGTGATCACATGTGCCT |
| | ATGGTGCTGTCTTTTCCAGTACAGGGGAACTAATTTTCATATTTTAATCTT |
| | GCAGCTTTTTGTTTACTTCATGCATTGTGATTTCTCATAGTTTTGCACAGA |
| | ACTCACTTCCCTACCTTTTCTGAAACAAAAGTATGTATACACACATACAT |
| | ATGTATTGAGCACCTCTATTTACTGTGTTCCACGTGCTGGGCATATAGCA |
| | AGAACAGAATGGTCTGGGGCCCTGCTCTAAAGAAGATTTAAAAGCAAAC |
| | ATATATTAAAAATGCGTGAGTCTGGCCAGGAGCAGTGGCTCATGCCTGCA |
| | ACCCCAGCACTTTGGGAGGCTGAAGCGGGTGAATCACCTGAGATCAGGA |
| | GTTGAGACCAGCCTGGCCAACATGGTGAAACCCCGTCTCTACTAAAAATA |
| | CAAAAATTAGCCTGGCATGGTGGCATGCGCCTGTAATTCCAGCTACTTTG |
| | GAGACTGAGACAGGAGAATCACTTGAGCCCAGGAAGTGGAGGTTGCAGT |
| | GAGCTGAGATCGCGCCACTGCACTCCAGCCTGGGTGACAGAGCAAGACT |
| | CCATCTCAAAAAAAAAAAAAAAACGTGTCTGTTCATAAGGTTCTACAAA |
| | TAGCTGTTGTTACAGAAAATAGGACTAGGGTTTTATTACTGGGGATTATG |
| | CAGTCGAGGTAAATATAAAATGAGGTTGTTTCTTCTTTTTTTTATTTGAGA |
| | CAGAGTCTTGTTTGCCAGGCTGGAGTGCAGTGGCGTGCTCTTAGCTCCGC |
| | CTCCCGGGATCAAACGATTCTCTTGCCTCAGCCTCTCGAGTAGCTGGGAC |
| | TACAGGCGCGTGCCACCACACCCAGCTGATTTTTGTATTTTTAGTAGAGA |
| | TGGGATTTCACCATGATGGCCAGGATGGTCTCGATCTTTTGACCTCATGA |
| | TCCACCCACCTCGGCCTCCCAAAGTGCTGGGATTACAGGCGTGAGCCACT |
| | GCACCCGGCCCTGGTTCTAAATACTCTTCCAGCTCTAAAACATTGATTCT |
| | AAACAGATCACATTCCAGGAGGACTCTAGCAAACCAGCATATGCAAATT |
| | ATAGCTTTTGCAAGACCGTTTCTACTTTTATATTACTGAACTCTATATGAT |
| | TGTCCAAGTAAAGTTTTGTGTCTCTTTGATTATTTGATTGTACTTTAAAAT |
| | TTTTTCACCATTCATTTAACATTTTTTACCATACTGTAGTATTTTTAATGCA |
| | ATTGTGTTTGCATTGGTGTGGCTTTAGAGGCTTCTCCAACCACCTTCCCAA |
| | AATACTGATCTGTGATTTTTTTCTTTAATGTTTGGCCAAACATAATACATG |
| | CTTATTTTATTTTTCATCCCTACAGAAAGGTAGAAGATGAGAATTCTGTCT |
| | CCTACTGTTGTTTTTCAAGGTGCCACTCAAATTTCTTGTACGTGTCTAGAA |
| | ACTTGTGCATACAATAGAAGTACACTGTGGCTGGGCATGGTGGCTCATGC |
| | CTGTAATCCCAGCACTTTGTGAAGCTGAGGTGGGTGGATCACCTGAGGTC |
| | AGGGAGTTTGAGACCAGCCTGGCCAACATGATGAAACCCCGTCTTTACTA |
| | AAATTAGAAAAAATTAGCCAGGCGTGGTGGTGTGCGCCTGTAATCCCAG |
| | CTACTCGGGAGGCTGAGGCATGAGAATCACTTGAACTCGGGTGGCAGAG |
| | GCTGCAGTGAGCTGAGATCATGCCACTGCATTCCAGCCTGCGCAGCTGAG |
| | CCAGACTCCATCTCCAAAAAAAAAAAAAAAAAAAAAAAAAGATGTCCA |
| | ATATATGTAACTTTTTTCTTTGGACACAAAAATTCCATTAGCTTTGTTTTC |
| | TCATTTTTACTTGTCATGATGTATGTCGAACACATTATTTTTAGTGTCTGG |
| | TGTTCCATTATACAGATGTCTCTCTTGTTGGTTGAATTTTTGCATTCACAG |
| | ACCCTCAAGTTGGATTCATATCTTTTTACACTAAGCATAAAGAAGACGGA |
| | TTGGGGTCGGGTATGGTGGCTCACGCCTGTAATCCCAGCACTTCGGGAGG |
| | CTGAGGTGGGCGGATCACGAGGTCAGGAGTTCGAGACCAGCCTGGCCAA |
| | CATACTGAAACCCCGTCTCTAAAAATATGAAAAAAAAATTAGCCAGGCG |
| | TGGTGGTGCGCAGCTGTAGCCCCAGCTACTTGGGAGGCTGAGGCAGGAG |
| | AATCACTTGAACCCAGGAGGTGGAGGTTGCAGTGAGCATATTGCACCATT |
| | GCATTCCAGCCTGCACGACAGAGGAAGACGCCATTTCAAAAAAAAAAAA |
| | AAAAAGACGGATTGATTTTCTTCAGCAGTATCAAGTGGCACTTACCATCC |
| | ACCCCTTTAACACCCAAACCATTCTAATCCATGTATACAGACCATCATCT |
| | GTTTCGTTATTGTGTTCTATAATGCAGCTTTGCGAGTTATGCAGTTTTGGT |
| | CCTCATGATATTTTTCTGATTGGTTTTTAATGTATTTTGTTCTAACGAGCC |
| | AACATTGTTATACATGTAATTTGTTTATTTGCTAGATTGTACTCTTTCCCA |
| | AAGATGGGCTATGAACTAGCATCTACTTTCATTTTACCTATTTACCTGTAA |
| | ACATTGAAAAAACTGAATCAAATGCAGTGATATCGGACCTAGTTTTATTG |
| | TTATGCCTTATAATGAATTTAACTTCACAGTTTTCTAAATGAGAGCATTTC |
| | CCAAAGACATCTTTATGGTCATAACCAGTTTCCCTTGGCATTTGATTTATT |
| | TTTATTTTTATTTATTTATCTTTTTGAGAAGGAGTTTCGCTCTTGTTGCCCA |
| | GGCTAGAGTGCAATGGCGTGATCTCGGGTCACTGCAACCTCTGCCTCCCG |
| | GGTTCAAGCGATTCTCCTGCCTCAGCCTCCAAGTAGCTGGGATTACAGGC |
| | ATGCACCACCACGCCCGACTAATTTGTATTTTTAGAGACGGGGTTTCTCC |
| | GTGTTGGTCAGGCTGGTCTCAAACTTCCAACCTCAGGTGATCCGCCCGCC |
| | GTGGCCTCCCAAAGTGTTGGGATTACAGGCGTGAGCCACAGTGTCTGGCC |
| | TGATTTGTTTTTAAGAGCATTATTTTTCTGCTTTATTTTGTGACTTCAACAT |
| | TTGACACAATTTTGGGTGAATGGTTTGTGCATGGTGCCTGACATCGTGTTT |
| | TGATGTGTAGTATATGCCATAGGACATGTGAGACAAGATATGTCCCAACT |
| | TGACCTTGTTTTGTATTGTTTATGTCAAGGTGTTGAGTGTATTAGATATAC |
| | TGTTGGGGCTCTGTGTTCTAGCTCTGCCTTTTAGATAATAACCATGGTTAA |
| | ATATTGCAATGTCCTGCATGTCTCCACACATGGGTTTTGTAACTGAGTCA |
| | GAATGATAAGTGATTAGTAAGCACATTTTTTCTCCTTTCAGGAAACCACT |
| | ATTTTCCTTTTCTACATGCTGTTTTGTAAGTAGTACTTTTATGAAGGTTGT |
| | CTTCAAATGTTCGCATCTTCCATTTCTACTGCCCTTGGGTTATCCATCCTG |
| | TCATTTTGTGCCAATCACTTTTTTTTTTAACTTTTAAGTTCAGGGATGAAA |
| | GTGTAGATTTGTTACATAGGTAAACTTGTGTCATGGGGTTGTTGTACAGA |
| | TTATTTCATCACCCAGGTGTTAAGCCTAGTATGCACTAGTTGTTTTTCCTG |
| | ATCCTCTCCCTGCTCCCACCCTCCACCCTCTGATAGGCCCCAGTGTGTGTT |
| | GTTCCCCTCTGTGTGTCCATGTGTTCTCATCATTTAGCTCCCACTTACAAG |
| | TGAGAATGTGGTGTTTGGTTTTCTGTTCCTGCATTAGTTTGCTAAGGATAA |
| | TGGCCTCGAGCTCCATCCAAGTCCCTGTAAAGGACATGATCTTGTACTTT |
| | TTTATGGCTGCATAGTATTCTGTGGTGTATATGTACCACATTTTCTTTATC |
| | CAGTCTATCATTAGGCATTTAGGTTGATTCCATGTTTTTGCTATTGTGAAT |
| | AGTGCTGCAATGAACATACATGTGCATGTCTTTTTATAATAGAATGATTT |
| | ATATTCTGTTGTGTATATACCCAGTAATGGGATTGCTGAGTTGAATGCTA |
| | TTTCTGCCTTTAGGTCTTTGATGAATTGCCACACTGTCTTCCACAATGGTT |
| | GAACTAATTTACACTCCCACCAACGGTGAATAAGTGTTCACTTTTCTCCA |
| | CAACCTTGTCAGCATCTATTATTTTTTGACTTTTTAGTAATAGCCATTCTG |
| | ACTGCTCACATCTATTTTGTAAATAAAGTTTTATTGAAACATGGCCTTACC |
| | CATTTGTTTACATATATTCATGGCTGTTTTTGTGCCACAATGTCAGAGTTG |
| | TCTTAAAGTAGACAGAGACTATCTGGCTGTAAAGCCTGAGATATATACTA |
| | ACTGGTTCTTTATGTAAAAAGTTTGCTGACCACCTACTCTAAACGTTTTGC |
| | AGTGATGGTAGTGTTGGCAAAAAACCAAATAGCTTACCCTCTTTAAATTT |
| | CCCTTTTACTTCTTACAAACTCCTAACACCATTTACGACTTTGTCATCAAT |
| | ATGGTCAACTAAGCTTGGTTTGCATGGCTCTACTTCCTTTCACCTTCCACT |
| | TAGGCAGTGTCTCCAAGTCCACTGCAGTTTCTATTTGTCTCCTGACTGTTA |
| | CTGTATCAGTTCTTACCTAAATAACATAACAACTGATCTCCCTACTTTTTG |
| | CCTATGCCCTCAAATGTGCTCATTGTTGATCTATCTCCCTGTTAGGTGTTC |
| | TTTTTCTCCTCTTTAGAAAGCAGCCAAGGAAACCAGGGTTCTCTCAAAGT |
| | GGAAAATACTGGAACTTATGTACTGTTATCATAATGATAGTTGGTGTTTT |
| | GAATTATAAGAATGATTCCAGGTGGTTTCTAAATCATCCAATAAAGCTGT |
| | ATTCACTCTGTAAAAAAAAAAA (SEQ ID NO: 53) |
| (NM_001968) | AGGCACAGGCAGCCTGCATACACTCCTTTTCCTGGTGTCAACATTATTTA |
| Homo sapiens | AAAGCATGGGAAATAGTAATGAGACAGTGTCTTCTTCATTAGAACCTTAG |
| eukaryotic | GAGTCTACTAGATTTCTTCATCTCTATTTGTTGTTATTAGTAGCCAAACTG |
| translation initiation | TGCAAAAAACACGGTCTTGAGAAATGACAGCACAGTATCTTAGAGGGAA |
| factor 4E (EIF4E), | AGGAAATGTAGGATGCCAGTGTGGGGACAAATTTCTGATTGCCAGTGATT |
| transcript variant 1 | GTTGTGAGCATAACAATAATTTCATGAACATTAAAGCCTCTATTGAGGGC |
| | AGCTGCAGTTGTAAAGGAAAAAAAATGGTCCTGAACATTTAAAACTACA |
| | CTGGTGTACATCATAATCAAACAAAGTAAACAGAAAAAAATTTAAACTT |
| | TGCTAAAAAAAAAAAGCAGAAGCACTTGATCTTTAGGAAGGCACGCAGT |
| | TGCTTATTATGAATCATTTCTAGAGTCCGATGCATTTTCAAAGCCGGTTAC |
| | AGTCATTACGAAGCACACCCTTGTGAGGTAAGTGTATCATCACCTTTGGT |
| | TCATAAATAAAAAAGCTGAGACGCCGAGCGATTAAGTCACTCGCCTAAG |
| | GAGAATGAGTCAACGTCAAGAGTCATAGTTGACCCGGCCTAAAGACTCC |
| | AGACCATCAGTCCAGGGCTTAGTCAGCGGGGCCCGGAGTGGCTTCCCTG |
| | GCTGGCATCTGGACTTAGGCTATTTCCGTGCACGTAAAAGCGGAATATTG |
| | GAACGGTTGCACAGAACTTCCAAATAATTTTTACCGCCACGCAAGATTTA |
| | GCCCTGAGGTCTTAATCTCAGGATTTGGGACAGTAAAAGCTGTCGTCCCT |
| | CCCCCTCGTCCAGCCGGTGGCAAGCGGGTACTGCGGGCGGTTCCGTCCGT |
| | CCCCTTTCGCAGAAATGGCAACGAATGACCACCAGCATTAGCTGAGCCA |
| | GGGGACGTGGGAGGGTTGATTGCCTAAACGACTCTGCATCGCCGCCTCTT |
| | TTTGAAACTAAGAGAAAATGGTGGGAGATCAAAAGAAAACTAAATAAAC |
| | ACACAGGCAACTTGTCCTGGGACCTCAACTAAGCAAATGAAGCCTTATTG |
| | TGTGTGCTGAGCCTGCAGTTCCCAACCTTCCGGGGAAGATGGGAGGACA |
| | GGGCGACAAAGGGCACAGTAGGCTTGCCTGGCAGTAAGTGTGACCGCAG |
| | CTATCCAGGCGGAAGAGCAGAGGACTGAAACCACCCTCCAGCAAGCGAG |
| | TGTCCGCCGCGTTGAGAACCGCGCACCCTACCCATCGGCCACGTGACCAG |
| | TCCTTTTTAAAAAAAATTTCTTTACCTTAAAAAAAAAAAAAAAAAAAAG |
| | GTGGGGGAGAGACTCCACTTCCCAGAAGCCTCTCGTTACTCACGCAGCCG |
| | CAGTCTTGCGCAGGTGCCGCCAGGGCCAAACGGACATATCCGTCACGTG |
| | GCCAGAAGCTGGCCAATCCGGTTTGAATCTCATTTTTTTCCTCTTACCCCC |
| | CCTTCTGGAGCGGTTGTGCGATCAGATCGATCTAAGATGGCGACTGTCGA |
| | ACCGGAAACCACCCCTACTCCTAATCCCCCGACTACAGAAGAGGAGAAA |
| | ACGGAATCTAATCAGGAGGTTGCTAACCCAGAACACTATATTAAACATCC |
| | CCTACAGAACAGATGGGCACTCTGGTTTTTTAAAAATGATAAAAGCAAA |
| | ACTTGGCAAGCAAACCTGCGGCTGATCTCCAAGTTTGATACTGTTGAAGA |
| | CTTTTGGGCTCTGTACAACCATATCCAGTTGTCTAGTAATTTAATGCCTGG |
| | CTGTGACTACTCACTTTTTAAGGATGGTATTGAGCCTATGTGGGAAGATG |
| | AGAAAAACAAACGGGGAGGACGATGGCTAATTACATTGAACAAACAGC |
| | AGAGACGAAGTGACCTCGATCGCTTTTGGCTAGAGACACTTCTGTGCCTT |
| | ATTGGAGAATCTTTTGATGACTACAGTGATGATGTATGTGGCGCTGTTGT |
| | TAATGTTAGAGCTAAAGGTGATAAGATAGCAATATGGACTACTGAATGT |
| | GAAAACAGAGAAGCTGTTACACATATAGGGAGGGTATACAAGGAAAGGT |
| | TAGGACTTCCTCCAAAGATAGTGATTGGTTATCAGTCCCACGCAGACACA |
| | GCTACTAAGAGCGGCTCCACCACTAAAAATAGGTTTGTTGTTTAAGAAGA |
| | CACCTTCTGAGTATTCTCATAGGAGACTGCGTCAAGCAATCGAGATTTGG |
| | GAGCTGAACCAAAGCCTCTTCAAAAAGCAGAGTGGACTGCATTTAAATTT |
| | GATTTCCATCTTAATGTTACTCAGATATAAGAGAAGTCTCATTCGCCTTTG |
| | TCTTGTACTTCTGTGTTCATTTTTTTTTTTTTTTTTGGCTAGAGTTTCCACT |
| | ATCCCAATCAAAGAATTACAGTACACATCCCCAGAATCCATAAATGTGTT |
| | CCTGGCCCACTCTGTAATAGTTCAGTAGAATTACCATTAATTACATACAG |
| | ATTTTACCTATCCACAATAGTCAGAAAACAACTTGGCATTTCTATACTTTA |
| | CAGGAAAAAAAATTCTGTTGTTCCATTTTATGCAGAAGCATATTTTGCTG |
| | GTTTGAAAGATTATGATGCATACAGTTTTCTAGCAATTTTCTTTGTTTCTT |
| | TTTACAGCATTGTCTTTGCTGTACTCTTGCTGATGGCTGCTAGATTTTAAT |
| | TTATTTGTTTCCCTACTTGATAATATTAGTGATTCTGATTTCAGTTTTTCAT |
| | TTGTTTTGCTTTTGTTTTTTTCCTCATGTAACATTGGTGAAGGATCCAGGA |
| | ATATGACACAAAGGTGGAATAAACATTAATTTTGTGCATTCTTTGGTAAT |
| | TTTTTTTGTTTTTTGTAACTACAAAGCTTTGCTACAAATTTATGCATTTCAT |
| | TCAAATCAGTGATCTATGTTTGTGTGATTTCCTAAACATAATTGTGGATTA |
| | TAAAAAATGTAACATCATAATTACATTCCTAACTAGAATTAGTATGTCTG |
| | TTTTTGTATCTTTATGCTGTATTTTAACACTTTGTATTACTTAGGTTATTTT |
| | GCTTTGGTTAAAAATGGCTCAAGTAGAAAAGCAGTCCCATTCATATTAAG |
| | ACAGTGTACAAAACTGTAAATAAAATGTGTACAGTGAATTGTCTTTTAGA |
| | CAACTAGATTTGTCCTTTTATTTCTCCATCTTTATAGAAGGAATTTGTACT |
| | TCTTATTGCAAGGCAGTCTCTATATTATGTCTTCTTTTGTGGTGTCTTCCAT |
| | GTGAACAGCATAAGTTTGGAGCACTAGTTTGATTATTATGTTTATTACAA |
| | TTTTTAATAAATTGAATAGGTAGTATCATATATATGGAATTAAATTGATG |
| | TGGCTATCTTTGTTTTTTTATAAAGTAAGGCACAGTCATTCAGTCTTAGGT |
| | AAATAATGTACTCTCTTAATATGTTAATACTCATGAGAATTGGGATCTGA |
| | TGCATCACCATTTGATTGGTAGCAACAGTGGTTGTAAAACTTGGTTGCTG |
| | AATTGAGTTGTTTCTATGTTAAGTGTCAAAATGATAGTGTAGGGAAAGTA |
| | CAGGTGGTGGGGACATATGCATTAAGAATCTTGTTAGTGTTGCAATCTAA |
| | ATAGAATGGAATAAACAGGTGTTAAGACATATTTATAGTGGTAAATTGTT |
| | GTAGTATGGTATTCTGTAAACTTGAAAACTTGATCTACTCTTTGTAGGTAT |
| | CATTTGAAAGCAAACTTGAAAATGTTTTGTACATAGTACATACTTGTATA |
| | GTCCTGTGAGATGAAGTATGGCTATCAGACCAAAGGATAAGCCAAACTG |
| | TAGGTAGCAGAATGGAAATTATTATTTTGAGAGGAAAATTTGTCTTTGAA |
| | TGGTGATTATGACTTAATCATTTTAAAACTGATAAACTTGACAAAAACCC |
| | TGTATGAAATAAACATGAAATTAATAGCACTGATTTCATTGTAAAATTTT |
| | AAAGCAGTTTAAAGGGTACCACAGGTTATCACAGTACTCTCAATGCCACA |
| | AACACCTCTTGTTCAGTATTCTAGAAATACTGAATCAGAATTCTGTGTTTA |
| | TTATAATCTCAGCATACTGTACATAATATCTGCTAGTTAAACTTGGGTAA |
| | TTGGTTAAGGTGACTTACTGTCTATGTCAATATGTATAGTTTTGAGTACTT |
| | CAAGAGTTTACTTAAAAGTGATGATGTTACTGGTATGTTGGCAGTGGGTG |
| | GGACTGAAGTAGTGTATCTATTATAAATTGATCTATTTTCTTAATTCTAAG |
| | ATGAAGTCCAATTTTAAGCATCAGCTTTTAGGTGCAAAGGAGGAATTAAC |
| | ACATTAAATGTATACAGTTCTAAATTTTTGAAATAACTGATGTGTAGCAT |
| | TTGATTATTGGTATTACCATTTTAGAATCATGATGTTATTTTAAACCTTTT |
| | TCCTGGGGACAAGAAAGGATAATAAATTACGCTGAATCACTTTTGGCAGT |
| | TGCCACTTAAATAGTACAGTGACTTGCAACTTTTATAACTTTATCAGCATC |
| | TTCTCTAAATACAAAATTAGGCTATATGTTATTTTCCAACTTACTGTTTTC |
| | TCTCTGTTTAGCAGGATATTATAAATAGATTAAATAGATATATTTTCTTTT |
| | TTTTTTTTTTTTTTTGAGACGGAGTCTCGCTTTGTCTCCCAGGCTGGAGTG |
| | CAGTGGCGTGATCTCCCAGTAGCTGGGACTACAAGCACCTGCCACCATGC |
| | CCGGCTAATTTTTTTTGTATTTTTAGTAGAGACGGGGTTTCACTGTGTTAG |
| | CCAAGATGGTCTCAATCTCCTGACTTTGTGATCTGCCTGCTTCTGCCTCCC |
| | AAAGTGCTGGGATTACAGGTGTGAGCCACCGTACCCAGCCCAAATAGAT |
| | GTATTTTCATAATAGAGAATTGAAATAGGCTTTAATGGGTGAATAGCAGT |
| | TTATTGTAGGCATGTGACATTTCATTTAATGAATTTAAAGTTTATTATCCC |
| | AATTCTACAGAAGGATTTAATGCATACTATGCAATTAAATAATTATAACA |
| | CTACATAGTAATAATTTATGTGCCAGGCAGTAGTTCAGTCACTTTACATG |
| | CTTATTAACCTGCAGAATAATCTTTTGAGATGTAGGTGCTGTTACTGAGA |
| | ATTTAACTTTTGCTTGTAAATTGCAAAGGGTGGATTTGAATTCTGGAAAT |
| | TTGGTTCCAGAGACAATAATTACATAACACTTTCTCCATAGGGTACAGCC |
| | TGTCTAATAGGCTATAGTAAATCACCTCAGCTTGTTATAGGTCGGGCATG |
| | CAAACATTTCTCCATTTTACTCCCTTTGGTAATGAATCTAGTAATAGATGG |
| | AAATTTTCCCTAGATTCACTGTGTTAGTCAGTTGGGGAAGTTTGGAGGCA |
| | AAGATACAGGAGTTTATGGGGAGGTAGTGTACATAAATATAATCATATG |
| | CTATATAAGGAAGTTTTGGTCAGCAGCAGACCATATATAGGATGGTGGG |
| | CCAGTAACATTGTAACACTGTATTTTTACTGTATCTTTTCCATGTTTTGTT |
| | ATGTTTAGATACACAAATAACATTATGGAGTATTCAGTATGGTAACATGC |
| | CATACAGGTTTGTAGCCTAGGAGCAGTAATAGACTGTTCCCTGAAACCTA |
| | TATTTGTGGTAGGTTTATACCATTCAGGTTTGTGTAAGTACACAACGAAA |
| | TCATCTAATGGCCCATTTCTCAAAACATATTCCCATCATTAATCAATGCAT |
| | GGTCATGTTTTCGTATACATTTTAAGCTTCTGTATTCTAATCTAATATAAA |
| | TGGCAAAATATTCAAACTGATAGGCATTGAGATTCTTAAATGCTAAAGTT |
| | GCATTCAAAAGGATAATTTTAGGCGTTGTGACAAAGCAGTGTTATATTTT |
| | AAAGTTAGTGACAAGGCTATGCACCTTTTATCTCTAATTGTTTCTTACAGA |
| | ATGTTTTTATTATTGAGTAGTAAAACAATAAATGTCAGATCCTTTATACA |
| | AATTCAAGATTGACATTGATAAACAAAACTTCAGCATATCACTCAAGGTC |
| | AGCGTAGAAATTGTGTGTCTGGAAACTTCTATAGTAATTTTATATTACTGT |
| | GACATTAGTATGTGATCACTTTTCTAGTAATGTTTTAAAAAAATATATCTT |
| | ACAGGCCAGGCATAGTGCTTTATGCCTGTAATCCCAGCACTTTGGGAGGC |
| | CAAGGTGGCAGGATTGCATGAGTCCAGGAGTTCAACACCAGTCTGGGCA |
| | ATAAAGTGAGACCCCATCGCTACAAACAAATTAAAAAATATTTATGTATG |
| | TGTGTAATATATATAATATATAACAAAACACATATGTATGTGTATATATA |
| | GTATGTCTGGCAGAGTACAATTTAGGGGTTAAGACTGGTCCCTCACATAT |
| | GGTGTGAGAAACACTGTTCACAGGTTGCTTTCCCCATTAGCCCAGGGCAA |
| | CTCATTTGCCCATCATTTCCTAGAACAACCGGGTCTGTTACGTCTACAGTT |
| | TTCATCTTCATGCAGTTATGGATTTGGTGTCAAAAACTTTGGTCCTGTTCT |
| | CTACCATCTTAAAATAAACTCTTGTGTCCTGCTTTACTATGAATTGCAAAG |
| | TAGGCATTAGGTAGCCTTCCTACTACCATAGTTTAGAGTTCAATATTCTTA |
| | TGACCATTCTACTGGTAGAAGCAAAAAATGAACTTGTAGGCATGTGATCA |
| | CATGTGCCTATGGTGCTGTCTTTTCCAGTACAGGGGAACTAATTTTCATAT |
| | TTTAATCTTGCAGCTTTTTGTTTACTTCATGCATTGTGATTTCTCATAGTTT |
| | TGCACAGAACTCACTTCCCTACCTTTTCTGAAACAAAAGTATGTATACAC |
| | ACATACATATGTATTGAGCACCTCTATTTACTGTGTTCCACGTGCTGGGC |
| | ATATAGCAAGAACAGAATGGTCTGGGGCCCTGCTCTAAAGAAGATTTAA |
| | AAGCAAACATATATTAAAAATGCGTGAGTCTGGCCAGGAGCAGTGGCTC |
| | ATGCCTGCAACCCCAGCACTTTGGGAGGCTGAAGCGGGTGAATCACCTG |
| | AGATCAGGAGTTGAGACCAGCCTGGCCAACATGGTGAAACCCCGTCTCT |
| | ACTAAAAATACAAAAATTAGCCTGGCATGGTGGCATGCGCCTGTAATTCC |
| | AGCTACTTTGGAGACTGAGACAGGAGAATCACTTGAGCCCAGGAAGTGG |
| | AGGTTGCAGTGAGCTGAGATCGCGCCACTGCACTCCAGCCTGGGTGACA |
| | GAGCAAGACTCCATCTCAAAAAAAAAAAAAAAACGTGTCTGTTCATAAG |
| | GTTCTACAAATAGCTGTTGTTACAGAAAATAGGACTAGGGTTTTATTACT |
| | GGGGATTATGCAGTCGAGGTAAATATAAAATGAGGTTGTTTCTTCTTTTT |
| | TTTATTTGAGACAGAGTCTTGTTTGCCAGGCTGGAGTGCAGTGGCGTGCT |
| | CTTAGCTCCGCCTCCCGGGATCAAACGATTCTCTTGCCTCAGCCTCTCGA |
| | GTAGCTGGGACTACAGGCGCGTGCCACCACACCCAGCTGATTTTTGTATT |
| | TTTAGTAGAGATGGGATTTCACCATGATGGCCAGGATGGTCTCGATCTTT |
| | TGACCTCATGATCCACCCACCTCGGCCTCCCAAAGTGCTGGGATTACAGG |
| | CGTGAGCCACTGCACCCGGCCCTGGTTCTAAATACTCTTCCAGCTCTAAA |
| | ACATTGATTCTAAACAGATCACATTCCAGGAGGACTCTAGCAAACCAGC |
| | ATATGCAAATTATAGCTTTTGCAAGACCGTTTCTACTTTTATATTACTGAA |
| | CTCTATATGATTGTCCAAGTAAAGTTTTGTGTCTCTTTGATTATTTGATTG |
| | TACTTTAAAATTTTTTCACCATTCATTTAACATTTTTTACCATACTGTAGT |
| | ATTTTTAATGCAATTGTGTTTGCATTGGTGTGGCTTTAGAGGCTTCTCCAA |
| | CCACCTTCCCAAAATACTGATCTGTGATTTTTTTCTTTAATGTTTGGCCAA |
| | ACATAATACATGCTTATTTTATTTTTCATCCCTACAGAAAGGTAGAAGAT |
| | GAGAATTCTGTCTCCTACTGTTGTTTTTCAAGGTGCCACTCAAATTTCTTG |
| | TACGTGTCTAGAAACTTGTGCATACAATAGAAGTACACTGTGGCTGGGCA |
| | TGGTGGCTCATGCCTGTAATCCCAGCACTTTGTGAAGCTGAGGTGGGTGG |
| | ATCACCTGAGGTCAGGGAGTTTGAGACCAGCCTGGCCAACATGATGAAA |
| | CCCCGTCTTTACTAAAATTAGAAAAAATTAGCCAGGCGTGGTGGTGTGCG |
| | CCTGTAATCCCAGCTACTCGGGAGGCTGAGGCATGAGAATCACTTGAACT |
| | CGGGTGGCAGAGGCTGCAGTGAGCTGAGATCATGCCACTGCATTCCAGC |
| | CTGCGCAGCTGAGCCAGACTCCATCTCCAAAAAAAAAAAAAAAAAAAAA |
| | AAAAGATGTCCAATATATGTAACTTTTTTCTTTGGACACAAAAATTCCAT |
| | TAGCTTTGTTTTCTCATTTTTACTTGTCATGATGTATGTCGAACACATTATT |
| | TTTAGTGTCTGGTGTTCCATTATACAGATGTCTCTCTTGTTGGTTGAATTT |
| | TTGCATTCACAGACCCTCAAGTTGGATTCATATCTTTTTACACTAAGCATA |
| | AAGAAGACGGATTGGGGTCGGGTATGGTGGCTCACGCCTGTAATCCCAG |
| | CACTTCGGGAGGCTGAGGTGGGCGGATCACGAGGTCAGGAGTTCGAGAC |
| | CAGCCTGGCCAACATACTGAAACCCCGTCTCTAAAAATATGAAAAAAAA |
| | ATTAGCCAGGCGTGGTGGTGCGCAGCTGTAGCCCCAGCTACTTGGGAGG |
| | CTGAGGCAGGAGAATCACTTGAACCCAGGAGGTGGAGGTTGCAGTGAGC |
| | ATATTGCACCATTGCATTCCAGCCTGCACGACAGAGGAAGACGCCATTTC |
| | AAAAAAAAAAAAAAAAAGACGGATTGATTTTCTTCAGCAGTATCAAGTG |
| | GCACTTACCATCCACCCCTTTAACACCCAAACCATTCTAATCCATGTATA |
| | CAGACCATCATCTGTTTCGTTATTGTGTTCTATAATGCAGCTTTGCGAGTT |
| | ATGCAGTTTTGGTCCTCATGATATTTTTCTGATTGGTTTTTAATGTATTTTG |
| | TTCTAACGAGCCAACATTGTTATACATGTAATTTGTTTATTTGCTAGATTG |
| | TACTCTTTCCCAAAGATGGGCTATGAACTAGCATCTACTTTCATTTTACCT |
| | ATTTACCTGTAAACATTGAAAAAACTGAATCAAATGCAGTGATATCGGAC |
| | CTAGTTTTATTGTTATGCCTTATAATGAATTTAACTTCACAGTTTTCTAAA |
| | TGAGAGCATTTCCCAAAGACATCTTTATGGTCATAACCAGTTTCCCTTGG |
| | CATTTGATTTATTTTTATTTTTATTTATTTATCTTTTTGAGAAGGAGTTTCG |
| | CTCTTGTTGCCCAGGCTAGAGTGCAATGGCGTGATCTCGGGTCACTGCAA |
| | CCTCTGCCTCCCGGGTTCAAGCGATTCTCCTGCCTCAGCCTCCAAGTAGCT |
| | GGGATTACAGGCATGCACCACCACGCCCGACTAATTTGTATTTTTAGAGA |
| | CGGGGTTTCTCCGTGTTGGTCAGGCTGGTCTCAAACTTCCAACCTCAGGT |
| | GATCCGCCCGCCGTGGCCTCCCAAAGTGTTGGGATTACAGGCGTGAGCCA |
| | CAGTGTCTGGCCTGATTTGTTTTTAAGAGCATTATTTTTCTGCTTTATTTTG |
| | TGACTTCAACATTTGACACAATTTTGGGTGAATGGTTTGTGCATGGTGCC |
| | TGACATCGTGTTTTGATGTGTAGTATATGCCATAGGACATGTGAGACAAG |
| | ATATGTCCCAACTTGACCTTGTTTTGTATTGTTTATGTCAAGGTGTTGAGT |
| | GTATTAGATATACTGTTGGGGCTCTGTGTTCTAGCTCTGCCTTTTAGATAA |
| | TAACCATGGTTAAATATTGCAATGTCCTGCATGTCTCCACACATGGGTTTT |
| | GTAACTGAGTCAGAATGATAAGTGATTAGTAAGCACATTTTTTCTCCTTT |
| | CAGGAAACCACTATTTTCCTTTTCTACATGCTGTTTTGTAAGTAGTACTTT |
| | TATGAAGGTTGTCTTCAAATGTTCGCATCTTCCATTTCTACTGCCCTTGGG |
| | TTATCCATCCTGTCATTTTGTGCCAATCACTTTTTTTTTTAACTTTTAAGTT |
| | CAGGGATGAAAGTGTAGATTTGTTACATAGGTAAACTTGTGTCATGGGGT |
| | TGTTGTACAGATTATTTCATCACCCAGGTGTTAAGCCTAGTATGCACTAG |
| | TTGTTTTTCCTGATCCTCTCCCTGCTCCCACCCTCCACCCTCTGATAGGCC |
| | CCAGTGTGTGTTGTTCCCCTCTGTGTGTCCATGTGTTCTCATCATTTAGCT |
| | CCCACTTACAAGTGAGAATGTGGTGTTTGGTTTTCTGTTCCTGCATTAGTT |
| | TGCTAAGGATAATGGCCTCGAGCTCCATCCAAGTCCCTGTAAAGGACATG |
| | ATCTTGTACTTTTTTATGGCTGCATAGTATTCTGTGGTGTATATGTACCAC |
| | ATTTTCTTTATCCAGTCTATCATTAGGCATTTAGGTTGATTCCATGTTTTTG |
| | CTATTGTGAATAGTGCTGCAATGAACATACATGTGCATGTCTTTTTATAAT |
| | AGAATGATTTATATTCTGTTGTGTATATACCCAGTAATGGGATTGCTGAG |
| | TTGAATGCTATTTCTGCCTTTAGGTCTTTGATGAATTGCCACACTGTCTTC |
| | CACAATGGTTGAACTAATTTACACTCCCACCAACGGTGAATAAGTGTTCA |
| | CTTTTCTCCACAACCTTGTCAGCATCTATTATTTTTTGACTTTTTAGTAATA |
| | GCCATTCTGACTGCTCACATCTATTTTGTAAATAAAGTTTTATTGAAACAT |
| | GGCCTTACCCATTTGTTTACATATATTCATGGCTGTTTTTGTGCCACAATG |
| | TCAGAGTTGTCTTAAAGTAGACAGAGACTATCTGGCTGTAAAGCCTGAGA |
| | TATATACTAACTGGTTCTTTATGTAAAAAGTTTGCTGACCACCTACTCTAA |
| | ACGTTTTGCAGTGATGGTAGTGTTGGCAAAAAACCAAATAGCTTACCCTC |
| | TTTAAATTTCCCTTTTACTTCTTACAAACTCCTAACACCATTTACGACTTT |
| | GTCATCAATATGGTCAACTAAGCTTGGTTTGCATGGCTCTACTTCCTTTCA |
| | CCTTCCACTTAGGCAGTGTCTCCAAGTCCACTGCAGTTTCTATTTGTCTCC |
| | TGACTGTTACTGTATCAGTTCTTACCTAAATAACATAACAACTGATCTCCC |
| | TACTTTTTGCCTATGCCCTCAAATGTGCTCATTGTTGATCTATCTCCCTGTT |
| | AGGTGTTCTTTTTCTCCTCTTTAGAAAGCAGCCAAGGAAACCAGGGTTCT |
| | CTCAAAGTGGAAAATACTGGAACTTATGTACTGTTATCATAATGATAGTT |
| | GGTGTTTTGAATTATAAGAATGATTCCAGGTGGTTTCTAAATCATCCAAT |
| | AAAGCTGTATTCACTCTGTAAAAAAAAAAA (SEQ ID NO: 54) |
| | AGGCACAGGCAGCCTGCATACACTCCTTTTCCTGGTGTCAACATTATTTA |
| (NM_001331017) | AAAGCATGGGAAATAGTAATGAGACAGTGTCTTCTTCATTAGAACCTTAG |
| Homo sapiens | GAGTCTACTAGATTTCTTCATCTCTATTTGTTGTTATTAGTAGCCAAACTG |
| eukaryotic | TGCAAAAAACACGGTCTTGAGAAATGACAGCACAGTATCTTAGAGGGAA |
| translation initiation | AGGAAATGTAGGATGCCAGTGTGGGGACAAATTTCTGATTGCCAGTGATT |
| factor 4E (EIF4E), | GTTGTGAGCATAACAATAATTTCATGAACATTAAAGCCTCTATTGAGGGC |
| transcript variant 4 | AGCTGCAGTTGTAAAGGAAAAAAAATGGTCCTGAACATTTAAAACTACA |
| | CTGGTGTACATCATAATCAAACAAAGTAAACAGAAAAAAATTTAAACTT |
| | TGCTAAAAAAAAAAAGCAGAAGCACTTGATCTTTAGGAAGGCACGCAGT |
| | TGCTTATTATGAATCATTTCTAGAGTCCGATGCATTTTCAAAGCCGGTTAC |
| | AGTCATTACGAAGCACACCCTTGTGAGGTAAGTGTATCATCACCTTTGGT |
| | TCATAAATAAAAAAGCTGAGACGCCGAGCGATTAAGTCACTCGCCTAAG |
| | GAGAATGAGTCAACGTCAAGAGTCATAGTTGACCCGGCCTAAAGACTCC |
| | AGACCATCAGTCCAGGGCTTAGTCAGCGGGGCCCGGAGTGGCTTCCCTG |
| | GCTGGCATCTGGACTTAGGCTATTTCCGTGCACGTAAAAGCGGAATATTG |
| | GAACGGTTGCACAGAACTTCCAAATAATTTTTACCGCCACGCAAGATTTA |
| | GCCCTGAGGTCTTAATCTCAGGATTTGGGACAGTAAAAGCTGTCGTCCCT |
| | CCCCCTCGTCCAGCCGGTGGCAAGCGGGTACTGCGGGCGGTTCCGTCCGT |
| | CCCCTTTCGCAGAAATGGCAACGAATGACCACCAGCATTAGCTGAGCCA |
| | GGGGACGTGGGAGGGTTGATTGCCTAAACGACTCTGCATCGCCGCCTCTT |
| | TTTGAAACTAAGAGAAAATGGTGGGAGATCAAAAGAAAACTAAATAAAC |
| | ACACAGGCAACTTGTCCTGGGACCTCAACTAAGCAAATGAAGCCTTATTG |
| | TGTGTGCTGAGCCTGCAGTTCCCAACCTTCCGGGGAAGATGGGAGGACA |
| | GGGCGACAAAGGGCACAGTAGGCTTGCCTGGCAGTAAGTGTGACCGCAG |
| | CTATCCAGGCGGAAGAGCAGAGGACTGAAACCACCCTCCAGCAAGCGAG |
| | TGTCCGCCGCGTTGAGAACCGCGCACCCTACCCATCGGCCACGTGACCAG |
| | TCCTTTTTAAAAAAAATTTCTTTACCTTAAAAAAAAAAAAAAAAAAAAG |
| | GTGGGGGAGAGACTCCACTTCCCAGAAGCCTCTCGTTACTCACGCAGCCG |
| | CAGTCTTGCGCAGGTGCCGCCAGGGCCAAACGGACATATCCGTCACGTG |
| | GCCAGAAGCTGGCCAATCCGGTTTGAATCTCATTTTTTTCCTCTTACCCCC |
| | CCTTCTGGAGCGGTTGTGCGATCAGATCGATCTAAGATGGCGACTGTCGA |
| | ACCGGGTGCTGTGAGGAAATGCATGGTTTGTTGAAAAGAACTGAGGACT |
| | GACAGCCGCCTCCTCCATGATTACCCTGGCTCTCTGTCCCACCCTTCTCAT |
| | GGCGCTTGGGGGACCATGGCTGATCCTGTCCTGAGACAAATTAAGACTCC |
| | TGTGGTGAAGCAGTTGGTCGAGAAAAAGTGATGCATGAAAAAGAAGCAA |
| | AACAAGAAGGAAAGAAAAAAAATGAGAGCTGAAGATGGTGAAAATGAT |
| | GCCATTAAAAAGCAGGCAGAAAGTCTGCGAGAATCCCAGGAAACCACCC |
| | CTACTCCTAATCCCCCGACTACAGAAGAGGAGAAAACGGAATCTAATCA |
| | GGAGGTTGCTAACCCAGAACACTATATTAAACATCCCCTACAGAACAGA |
| | TGGGCACTCTGGTTTTTTAAAAATGATAAAAGCAAAACTTGGCAAGCAA |
| | ACCTGCGGCTGATCTCCAAGTTTGATACTGTTGAAGACTTTTGGGCTCTGT |
| | ACAACCATATCCAGTTGTCTAGTAATTTAATGCCTGGCTGTGACTACTCA |
| | CTTTTTAAGGATGGTATTGAGCCTATGTGGGAAGATGAGAAAAACAAAC |
| | GGGGAGGACGATGGCTAATTACATTGAACAAACAGCAGAGACGAAGTGA |
| | CCTCGATCGCTTTTGGCTAGAGACACTTCTGTGCCTTATTGGAGAATCTTT |
| | TGATGACTACAGTGATGATGTATGTGGCGCTGTTGTTAATGTTAGAGCTA |
| | AAGGTGATAAGATAGCAATATGGACTACTGAATGTGAAAACAGAGAAGC |
| | TGTTACACATATAGGGAGGGTATACAAGGAAAGGTTAGGACTTCCTCCA |
| | AAGATAGTGATTGGTTATCAGTCCCACGCAGACACAGCTACTAAGAGCG |
| | GCTCCACCACTAAAAATAGGTTTGTTGTTTAAGAAGACACCTTCTGAGTA |
| | TTCTCATAGGAGACTGCGTCAAGCAATCGAGATTTGGGAGCTGAACCAA |
| | AGCCTCTTCAAAAAGCAGAGTGGACTGCATTTAAATTTGATTTCCATCTT |
| | AATGTTACTCAGATATAAGAGAAGTCTCATTCGCCTTTGTCTTGTACTTCT |
| | GTGTTCATTTTTTTTTTTTTTTTTGGCTAGAGTTTCCACTATCCCAATCAAA |
| | GAATTACAGTACACATCCCCAGAATCCATAAATGTGTTCCTGGCCCACTC |
| | TGTAATAGTTCAGTAGAATTACCATTAATTACATACAGATTTTACCTATCC |
| | ACAATAGTCAGAAAACAACTTGGCATTTCTATACTTTACAGGAAAAAAA |
| | ATTCTGTTGTTCCATTTTATGCAGAAGCATATTTTGCTGGTTTGAAAGATT |
| | ATGATGCATACAGTTTTCTAGCAATTTTCTTTGTTTCTTTTTACAGCATTGT |
| | CTTTGCTGTACTCTTGCTGATGGCTGCTAGATTTTAATTTATTTGTTTCCCT |
| | ACTTGATAATATTAGTGATTCTGATTTCAGTTTTTCATTTGTTTTGCTTTTG |
| | TTTTTTTCCTCATGTAACATTGGTGAAGGATCCAGGAATATGACACAAAG |
| | GTGGAATAAACATTAATTTTGTGCATTCTTTGGTAATTTTTTTTGTTTTTTG |
| | TAACTACAAAGCTTTGCTACAAATTTATGCATTTCATTCAAATCAGTGAT |
| | CTATGTTTGTGTGATTTCCTAAACATAATTGTGGATTATAAAAAATGTAA |
| | CATCATAATTACATTCCTAACTAGAATTAGTATGTCTGTTTTTGTATCTTT |
| | ATGCTGTATTTTAACACTTTGTATTACTTAGGTTATTTTGCTTTGGTTAAA |
| | AATGGCTCAAGTAGAAAAGCAGTCCCATTCATATTAAGACAGTGTACAA |
| | AACTGTAAATAAAATGTGTACAGTGAATTGTCTTTTAGACAACTAGATTT |
| | GTCCTTTTATTTCTCCATCTTTATAGAAGGAATTTGTACTTCTTATTGCAA |
| | GGCAGTCTCTATATTATGTCTTCTTTTGTGGTGTCTTCCATGTGAACAGCA |
| | TAAGTTTGGAGCACTAGTTTGATTATTATGTTTATTACAATTTTTAATAAA |
| | TTGAATAGGTAGTATCATATATATGGAATTAAATTGATGTGGCTATCTTT |
| | GTTTTTTTATAAAGTAAGGCACAGTCATTCAGTCTTAGGTAAATAATGTA |
| | CTCTCTTAATATGTTAATACTCATGAGAATTGGGATCTGATGCATCACCA |
| | TTTGATTGGTAGCAACAGTGGTTGTAAAACTTGGTTGCTGAATTGAGTTG |
| | TTTCTATGTTAAGTGTCAAAATGATAGTGTAGGGAAAGTACAGGTGGTGG |
| | GGACATATGCATTAAGAATCTTGTTAGTGTTGCAATCTAAATAGAATGGA |
| | ATAAACAGGTGTTAAGACATATTTATAGTGGTAAATTGTTGTAGTATGGT |
| | ATTCTGTAAACTTGAAAACTTGATCTACTCTTTGTAGGTATCATTTGAAAG |
| | CAAACTTGAAAATGTTTTGTACATAGTACATACTTGTATAGTCCTGTGAG |
| | ATGAAGTATGGCTATCAGACCAAAGGATAAGCCAAACTGTAGGTAGCAG |
| | AATGGAAATTATTATTTTGAGAGGAAAATTTGTCTTTGAATGGTGATTAT |
| | GACTTAATCATTTTAAAACTGATAAACTTGACAAAAACCCTGTATGAAAT |
| | AAACATGAAATTAATAGCACTGATTTCATTGTAAAATTTTAAAGCAGTTT |
| | AAAGGGTACCACAGGTTATCACAGTACTCTCAATGCCACAAACACCTCTT |
| | GTTCAGTATTCTAGAAATACTGAATCAGAATTCTGTGTTTATTATAATCTC |
| | AGCATACTGTACATAATATCTGCTAGTTAAACTTGGGTAATTGGTTAAGG |
| | TGACTTACTGTCTATGTCAATATGTATAGTTTTGAGTACTTCAAGAGTTTA |
| | CTTAAAAGTGATGATGTTACTGGTATGTTGGCAGTGGGTGGGACTGAAGT |
| | AGTGTATCTATTATAAATTGATCTATTTTCTTAATTCTAAGATGAAGTCCA |
| | ATTTTAAGCATCAGCTTTTAGGTGCAAAGGAGGAATTAACACATTAAATG |
| | TATACAGTTCTAAATTTTTGAAATAACTGATGTGTAGCATTTGATTATTGG |
| | TATTACCATTTTAGAATCATGATGTTATTTTAAACCTTTTTCCTGGGGACA |
| | AGAAAGGATAATAAATTACGCTGAATCACTTTTGGCAGTTGCCACTTAAA |
| | TAGTACAGTGACTTGCAACTTTTATAACTTTATCAGCATCTTCTCTAAATA |
| | CAAAATTAGGCTATATGTTATTTTCCAACTTACTGTTTTCTCTCTGTTTAG |
| | CAGGATATTATAAATAGATTAAATAGATATATTTTCTTTTTTTTTTTTTTTT |
| | TTTGAGACGGAGTCTCGCTTTGTCTCCCAGGCTGGAGTGCAGTGGCGTGA |
| | TCTCCCAGTAGCTGGGACTACAAGCACCTGCCACCATGCCCGGCTAATTT |
| | TTTTTGTATTTTTAGTAGAGACGGGGTTTCACTGTGTTAGCCAAGATGGTC |
| | TCAATCTCCTGACTTTGTGATCTGCCTGCTTCTGCCTCCCAAAGTGCTGGG |
| | ATTACAGGTGTGAGCCACCGTACCCAGCCCAAATAGATGTATTTTCATAA |
| | TAGAGAATTGAAATAGGCTTTAATGGGTGAATAGCAGTTTATTGTAGGCA |
| | TGTGACATTTCATTTAATGAATTTAAAGTTTATTATCCCAATTCTACAGAA |
| | GGATTTAATGCATACTATGCAATTAAATAATTATAACACTACATAGTAAT |
| | AATTTATGTGCCAGGCAGTAGTTCAGTCACTTTACATGCTTATTAACCTGC |
| | AGAATAATCTTTTGAGATGTAGGTGCTGTTACTGAGAATTTAACTTTTGCT |
| | TGTAAATTGCAAAGGGTGGATTTGAATTCTGGAAATTTGGTTCCAGAGAC |
| | AATAATTACATAACACTTTCTCCATAGGGTACAGCCTGTCTAATAGGCTA |
| | TAGTAAATCACCTCAGCTTGTTATAGGTCGGGCATGCAAACATTTCTCCA |
| | TTTTACTCCCTTTGGTAATGAATCTAGTAATAGATGGAAATTTTCCCTAGA |
| | TTCACTGTGTTAGTCAGTTGGGGAAGTTTGGAGGCAAAGATACAGGAGTT |
| | TATGGGGAGGTAGTGTACATAAATATAATCATATGCTATATAAGGAAGTT |
| | TTGGTCAGCAGCAGACCATATATAGGATGGTGGGCCAGTAACATTGTAA |
| | CACTGTATTTTTACTGTATCTTTTCCATGTTTTGTTATGTTTAGATACACAA |
| | ATAACATTATGGAGTATTCAGTATGGTAACATGCCATACAGGTTTGTAGC |
| | CTAGGAGCAGTAATAGACTGTTCCCTGAAACCTATATTTGTGGTAGGTTT |
| | ATACCATTCAGGTTTGTGTAAGTACACAACGAAATCATCTAATGGCCCAT |
| | TTCTCAAAACATATTCCCATCATTAATCAATGCATGGTCATGTTTTCGTAT |
| | ACATTTTAAGCTTCTGTATTCTAATCTAATATAAATGGCAAAATATTCAA |
| | ACTGATAGGCATTGAGATTCTTAAATGCTAAAGTTGCATTCAAAAGGATA |
| | ATTTTAGGCGTTGTGACAAAGCAGTGTTATATTTTAAAGTTAGTGACAAG |
| | GCTATGCACCTTTTATCTCTAATTGTTTCTTACAGAATGTTTTTATTATTGA |
| | GTAGTAAAACAATAAATGTCAGATCCTTTATACAAATTCAAGATTGACAT |
| | TGATAAACAAAACTTCAGCATATCACTCAAGGTCAGCGTAGAAATTGTGT |
| | GTCTGGAAACTTCTATAGTAATTTTATATTACTGTGACATTAGTATGTGAT |
| | CACTTTTCTAGTAATGTTTTAAAAAAATATATCTTACAGGCCAGGCATAG |
| | TGCTTTATGCCTGTAATCCCAGCACTTTGGGAGGCCAAGGTGGCAGGATT |
| | GCATGAGTCCAGGAGTTCAACACCAGTCTGGGCAATAAAGTGAGACCCC |
| | ATCGCTACAAACAAATTAAAAAATATTTATGTATGTGTGTAATATATATA |
| | ATATATAACAAAACACATATGTATGTGTATATATAGTATGTCTGGCAGAG |
| | TACAATTTAGGGGTTAAGACTGGTCCCTCACATATGGTGTGAGAAACACT |
| | GTTCACAGGTTGCTTTCCCCATTAGCCCAGGGCAACTCATTTGCCCATCAT |
| | TTCCTAGAACAACCGGGTCTGTTACGTCTACAGTTTTCATCTTCATGCAGT |
| | TATGGATTTGGTGTCAAAAACTTTGGTCCTGTTCTCTACCATCTTAAAATA |
| | AACTCTTGTGTCCTGCTTTACTATGAATTGCAAAGTAGGCATTAGGTAGC |
| | CTTCCTACTACCATAGTTTAGAGTTCAATATTCTTATGACCATTCTACTGG |
| | TAGAAGCAAAAAATGAACTTGTAGGCATGTGATCACATGTGCCTATGGT |
| | GCTGTCTTTTCCAGTACAGGGGAACTAATTTTCATATTTTAATCTTGCAGC |
| | TTTTTGTTTACTTCATGCATTGTGATTTCTCATAGTTTTGCACAGAACTCA |
| | CTTCCCTACCTTTTCTGAAACAAAAGTATGTATACACACATACATATGTA |
| | TTGAGCACCTCTATTTACTGTGTTCCACGTGCTGGGCATATAGCAAGAAC |
| | AGAATGGTCTGGGGCCCTGCTCTAAAGAAGATTTAAAAGCAAACATATA |
| | TTAAAAATGCGTGAGTCTGGCCAGGAGCAGTGGCTCATGCCTGCAACCCC |
| | AGCACTTTGGGAGGCTGAAGCGGGTGAATCACCTGAGATCAGGAGTTGA |
| | GACCAGCCTGGCCAACATGGTGAAACCCCGTCTCTACTAAAAATACAAA |
| | AATTAGCCTGGCATGGTGGCATGCGCCTGTAATTCCAGCTACTTTGGAGA |
| | CTGAGACAGGAGAATCACTTGAGCCCAGGAAGTGGAGGTTGCAGTGAGC |
| | TGAGATCGCGCCACTGCACTCCAGCCTGGGTGACAGAGCAAGACTCCAT |
| | CTCAAAAAAAAAAAAAAAACGTGTCTGTTCATAAGGTTCTACAAATAGC |
| | TGTTGTTACAGAAAATAGGACTAGGGTTTTATTACTGGGGATTATGCAGT |
| | CGAGGTAAATATAAAATGAGGTTGTTTCTTCTTTTTTTTATTTGAGACAGA |
| | GTCTTGTTTGCCAGGCTGGAGTGCAGTGGCGTGCTCTTAGCTCCGCCTCC |
| | CGGGATCAAACGATTCTCTTGCCTCAGCCTCTCGAGTAGCTGGGACTACA |
| | GGCGCGTGCCACCACACCCAGCTGATTTTTGTATTTTTAGTAGAGATGGG |
| | ATTTCACCATGATGGCCAGGATGGTCTCGATCTTTTGACCTCATGATCCA |
| | CCCACCTCGGCCTCCCAAAGTGCTGGGATTACAGGCGTGAGCCACTGCAC |
| | CCGGCCCTGGTTCTAAATACTCTTCCAGCTCTAAAACATTGATTCTAAAC |
| | AGATCACATTCCAGGAGGACTCTAGCAAACCAGCATATGCAAATTATAG |
| | CTTTTGCAAGACCGTTTCTACTTTTATATTACTGAACTCTATATGATTGTC |
| | CAAGTAAAGTTTTGTGTCTCTTTGATTATTTGATTGTACTTTAAAATTTTTT |
| | CACCATTCATTTAACATTTTTTACCATACTGTAGTATTTTTAATGCAATTG |
| | TGTTTGCATTGGTGTGGCTTTAGAGGCTTCTCCAACCACCTTCCCAAAATA |
| | CTGATCTGTGATTTTTTTCTTTAATGTTTGGCCAAACATAATACATGCTTA |
| | TTTTATTTTTCATCCCTACAGAAAGGTAGAAGATGAGAATTCTGTCTCCTA |
| | CTGTTGTTTTTCAAGGTGCCACTCAAATTTCTTGTACGTGTCTAGAAACTT |
| | GTGCATACAATAGAAGTACACTGTGGCTGGGCATGGTGGCTCATGCCTGT |
| | AATCCCAGCACTTTGTGAAGCTGAGGTGGGTGGATCACCTGAGGTCAGG |
| | GAGTTTGAGACCAGCCTGGCCAACATGATGAAACCCCGTCTTTACTAAAA |
| | TTAGAAAAAATTAGCCAGGCGTGGTGGTGTGCGCCTGTAATCCCAGCTAC |
| | TCGGGAGGCTGAGGCATGAGAATCACTTGAACTCGGGTGGCAGAGGCTG |
| | CAGTGAGCTGAGATCATGCCACTGCATTCCAGCCTGCGCAGCTGAGCCAG |
| | ACTCCATCTCCAAAAAAAAAAAAAAAAAAAAAAAAAGATGTCCAATATA |
| | TGTAACTTTTTTCTTTGGACACAAAAATTCCATTAGCTTTGTTTTCTCATTT |
| | TTACTTGTCATGATGTATGTCGAACACATTATTTTTAGTGTCTGGTGTTCC |
| | ATTATACAGATGTCTCTCTTGTTGGTTGAATTTTTGCATTCACAGACCCTC |
| | AAGTTGGATTCATATCTTTTTACACTAAGCATAAAGAAGACGGATTGGGG |
| | TCGGGTATGGTGGCTCACGCCTGTAATCCCAGCACTTCGGGAGGCTGAGG |
| | TGGGCGGATCACGAGGTCAGGAGTTCGAGACCAGCCTGGCCAACATACT |
| | GAAACCCCGTCTCTAAAAATATGAAAAAAAAATTAGCCAGGCGTGGTGG |
| | TGCGCAGCTGTAGCCCCAGCTACTTGGGAGGCTGAGGCAGGAGAATCAC |
| | TTGAACCCAGGAGGTGGAGGTTGCAGTGAGCATATTGCACCATTGCATTC |
| | CAGCCTGCACGACAGAGGAAGACGCCATTTCAAAAAAAAAAAAAAAAA |
| | GACGGATTGATTTTCTTCAGCAGTATCAAGTGGCACTTACCATCCACCCC |
| | TTTAACACCCAAACCATTCTAATCCATGTATACAGACCATCATCTGTTTCG |
| | TTATTGTGTTCTATAATGCAGCTTTGCGAGTTATGCAGTTTTGGTCCTCAT |
| | GATATTTTTCTGATTGGTTTTTAATGTATTTTGTTCTAACGAGCCAACATT |
| | GTTATACATGTAATTTGTTTATTTGCTAGATTGTACTCTTTCCCAAAGATG |
| | GGCTATGAACTAGCATCTACTTTCATTTTACCTATTTACCTGTAAACATTG |
| | AAAAAACTGAATCAAATGCAGTGATATCGGACCTAGTTTTATTGTTATGC |
| | CTTATAATGAATTTAACTTCACAGTTTTCTAAATGAGAGCATTTCCCAAA |
| | GACATCTTTATGGTCATAACCAGTTTCCCTTGGCATTTGATTTATTTTTAT |
| | TTTTATTTATTTATCTTTTTGAGAAGGAGTTTCGCTCTTGTTGCCCAGGCT |
| | AGAGTGCAATGGCGTGATCTCGGGTCACTGCAACCTCTGCCTCCCGGGTT |
| | CAAGCGATTCTCCTGCCTCAGCCTCCAAGTAGCTGGGATTACAGGCATGC |
| | ACCACCACGCCCGACTAATTTGTATTTTTAGAGACGGGGTTTCTCCGTGTT |
| | GGTCAGGCTGGTCTCAAACTTCCAACCTCAGGTGATCCGCCCGCCGTGGC |
| | CTCCCAAAGTGTTGGGATTACAGGCGTGAGCCACAGTGTCTGGCCTGATT |
| | TGTTTTTAAGAGCATTATTTTTCTGCTTTATTTTGTGACTTCAACATTTGAC |
| | ACAATTTTGGGTGAATGGTTTGTGCATGGTGCCTGACATCGTGTTTTGAT |
| | GTGTAGTATATGCCATAGGACATGTGAGACAAGATATGTCCCAACTTGAC |
| | CTTGTTTTGTATTGTTTATGTCAAGGTGTTGAGTGTATTAGATATACTGTT |
| | GGGGCTCTGTGTTCTAGCTCTGCCTTTTAGATAATAACCATGGTTAAATAT |
| | TGCAATGTCCTGCATGTCTCCACACATGGGTTTTGTAACTGAGTCAGAAT |
| | GATAAGTGATTAGTAAGCACATTTTTTCTCCTTTCAGGAAACCACTATTTT |
| | CCTTTTCTACATGCTGTTTTGTAAGTAGTACTTTTATGAAGGTTGTCTTCA |
| | AATGTTCGCATCTTCCATTTCTACTGCCCTTGGGTTATCCATCCTGTCATT |
| | TTGTGCCAATCACTTTTTTTTTTAACTTTTAAGTTCAGGGATGAAAGTGTA |
| | GATTTGTTACATAGGTAAACTTGTGTCATGGGGTTGTTGTACAGATTATTT |
| | CATCACCCAGGTGTTAAGCCTAGTATGCACTAGTTGTTTTTCCTGATCCTC |
| | TCCCTGCTCCCACCCTCCACCCTCTGATAGGCCCCAGTGTGTGTTGTTCCC |
| | CTCTGTGTGTCCATGTGTTCTCATCATTTAGCTCCCACTTACAAGTGAGAA |
| | TGTGGTGTTTGGTTTTCTGTTCCTGCATTAGTTTGCTAAGGATAATGGCCT |
| | CGAGCTCCATCCAAGTCCCTGTAAAGGACATGATCTTGTACTTTTTTATG |
| | GCTGCATAGTATTCTGTGGTGTATATGTACCACATTTTCTTTATCCAGTCT |
| | ATCATTAGGCATTTAGGTTGATTCCATGTTTTTGCTATTGTGAATAGTGCT |
| | GCAATGAACATACATGTGCATGTCTTTTTATAATAGAATGATTTATATTCT |
| | GTTGTGTATATACCCAGTAATGGGATTGCTGAGTTGAATGCTATTTCTGC |
| | CTTTAGGTCTTTGATGAATTGCCACACTGTCTTCCACAATGGTTGAACTAA |
| | TTTACACTCCCACCAACGGTGAATAAGTGTTCACTTTTCTCCACAACCTTG |
| | TCAGCATCTATTATTTTTTGACTTTTTAGTAATAGCCATTCTGACTGCTCA |
| | CATCTATTTTGTAAATAAAGTTTTATTGAAACATGGCCTTACCCATTTGTT |
| | TACATATATTCATGGCTGTTTTTGTGCCACAATGTCAGAGTTGTCTTAAAG |
| | TAGACAGAGACTATCTGGCTGTAAAGCCTGAGATATATACTAACTGGTTC |
| | TTTATGTAAAAAGTTTGCTGACCACCTACTCTAAACGTTTTGCAGTGATG |
| | GTAGTGTTGGCAAAAAACCAAATAGCTTACCCTCTTTAAATTTCCCTTTTA |
| | CTTCTTACAAACTCCTAACACCATTTACGACTTTGTCATCAATATGGTCAA |
| | CTAAGCTTGGTTTGCATGGCTCTACTTCCTTTCACCTTCCACTTAGGCAGT |
| | GTCTCCAAGTCCACTGCAGTTTCTATTTGTCTCCTGACTGTTACTGTATCA |
| | GTTCTTACCTAAATAACATAACAACTGATCTCCCTACTTTTTGCCTATGCC |
| | CTCAAATGTGCTCATTGTTGATCTATCTCCCTGTTAGGTGTTCTTTTTCTCC |
| | TCTTTAGAAAGCAGCCAAGGAAACCAGGGTTCTCTCAAAGTGGAAAATA |
| | CTGGAACTTATGTACTGTTATCATAATGATAGTTGGTGTTTTGAATTATAA |
| | GAATGATTCCAGGTGGTTTCTAAATCATCCAATAAAGCTGTATTCACTCT |
| | GTAAAAAAAAAAA (SEQ ID NO: 55) |

[0149] In some embodiments, the EIF4E is an ortholog of human EIF4E. For example, in some embodiments, the EIF4E is a plant ortholog such as the protein described in German-Retana, S. et al. J. Virol. (2008) vol. 82 no. 15 7601-7612 (incorporated herein by reference).

[0150] In some embodiments, the EIF4E protein has an amino acid sequence comprising, consisting of, or consisting essentially of all or part of a sequence selected from SEQ ID NO: 56, SEQ ID NO: 57, SEQ ID NO: 58, SEQ ID NO: 59, and a biological equivalent of each thereof.

| | |
|---|---|
| (NP_001124150) | MLDLTSRGQVGTSRRMAEAACSAHFLETTPTPNPPTTEEEKTES |
| | NQEVANPEHYIKHPLQNRWALWFFKNDKSKTWQANLRLISKF |
| | DTVEDFWALYNHIQLSSNLMPGCDYSLFKDGIEPMWEDEKNK |
| | RGGRWLITLNKQQRRSDLDRFWLETLLCLIGESFDDYSDDVCG |
| | AVVNVRAKGDKIAIWTTECENREAVTHIGRVYKERLGLPPKIVI |
| | GYQSHADTATKSGSTTKNRFVV (SEQ ID NO: 56) |
| (NP_001124151) | MATVEPETTPTPNPPTTEEEKTESNQEVANPEHYIKHPLQNRWA |
| | LWFFKNDKSKTWQANLRLISKFDTVEDFWALYNHIQLSSNLMP |
| | GCDYSLFKDGIEPMWEDEKNKRGGRWLITLNKQQRRSDLDRF |
| | WLETRWDLAMLPRLVSNFWPQVILPLQPPKVLELQLLCLIGESF |
| | DDYSDDVCGAVVNVRAKGDKIAIWTTECENREAVTHIGRVYK |
| | ERLGLPPKIVIGYQSHADTATKSGSTTKNRFVV (SEQ ID NO: 57) |
| (NP_001317946) | MKKKQNKKERKKMRAEDGENDAIKKQAESLRESQETTPTPNPP |
| | TTEEEKTESNQEVANPEHYIKHPLQNRWALWFFKNDKSKTWQ |
| | ANLRLISKFDTVEDFWALYNHIQLSSNLMPGCDYSLFKDGIEPM |
| | WEDEKNKRGGRWLITLNKQQRRSDLDRFWLETLLCLIGESFDD |
| | YSDDVCGAVVNVRAKGDKIAIWTTECENREAVTHIGRVYKERL |
| | GLPPKIVIGYQSHADTATKSGSTTKNRFVV (SEQ ID NO: 58) |
| (NP_001959) | MATVEPETTPTPNPPTTEEEKTESNQEVANPEHYIKHPLQNRWA |
| | LWFFKNDKSKTWQANLRLISKFDTVEDFWALYNHIQLSSNLMP |
| | GCDYSLFKDGIEPMWEDEKNKRGGRWLITLNKQQRRSDLDRF |
| | WLETLLCLIGESFDDYSDDVCGAVVNVRAKGDKIAIWTTECEN |
| | REAVTHIGRVYKERLGLPPKIVIGYQSHADTATKSGSTTKNRFV |
| | V (SEQ ID NO: 59) |

[0151] In some embodiments, one or more kinase phosphorylation domains of the EIF4E protein are mutated. In some embodiments, all kinase phosphorylation domains of the EIF4E protein are mutated. In some embodiments, the mutation replaces the amino acid of the phosphorylation domain with a negatively charged amino acid such as aspartic acid or glutamic acid. In other embodiments, the mutation replaces the amino acid of the phosphorylation domain with an uncharged residue such alanine or glycine. In some embodiments, EIF4E comprises one or more phosphomimetic mutations and/or mutations to reduce EIF4E′s interaction with EIF4G. In some embodiments, the EIF4E protein comprises one or more mutations selected from the group consisting of: S209D, H37R, V69A, and W73F. In some embodiments, the mutated EIF4E is constitutively active.

| Mutation | Type |
|---|---|
| S209D | phosphomimetic |
| H37R | reduce EIF4G interaction |
| V69A | reduce EIF4G interaction |
| W73F | reduce EIF4G interaction |

[0152] In some embodiments, the fusion protein is a dCas9-EIF4E fusion protein encoded by a nucleic acid comprising the following nucleic acid sequence:

(SEQ ID NO: 60)
ATGGGTAAGCCTATCCCTAACCCTCTCCTCGGTCTCGATTCTACGGCTAGCATGGAC
AAGAAGTACAGCATCGGCCTGGCCATCGGCACCAACTCTGTGGGCTGGGCCGTGAT
CACCGACGAGTACAAGGTGCCCAGCAAGAAATTCAAGGTGCTGGGCAACACCGACC
GGCACAGCATCAAGAAGAACCTGATCGGCGCCCTGCTGTTCGACAGCGGAGAAACA
GCCGAGGCCACCCGGCTGAAGAGAACCGCCAGAAGAAGATACACCAGACGGAAGA
ACCGGATCTGCTATCTGCAAGAGATCTTCAGCAACGAGATGGCCAAGGTGGACGAC
AGCTTCTTCCACAGACTGGAAGAGTCCTTCCTGGTGGAAGAGGATAAGAAGCACGA
GCGGCACCCCATCTTCGGCAACATCGTGGACGAGGTGGCCTACCACGAGAAGTACC
CCACCATCTACCACCTGAGAAAGAAACTGGTGGACAGCACCGACAAGGCCGACCTG
CGGCTGATCTATCTGGCCCTGGCCCACATGATCAAGTTCCGGGGCCACTTCCTGATC
GAGGGCGACCTGAACCCCGACAACAGCGACGTGGACAAGCTGTTCATCCAGCTGGT
GCAGACCTACAACCAGCTGTTCGAGGAAAACCCCATCAACGCCAGCGGCGTGGACG
CCAAGGCCATCCTGTCTGCCAGACTGAGCAAGAGCAGACGGCTGGAAAATCTGATC
GCCCAGCTGCCCGGCGAGAAGAAGAATGGCCTGTTCGGCAACCTGATTGCCCTGAG
CCTGGGCCTGACCCCCAACTTCAAGAGCAACTTCGACCTGGCCGAGGATGCCAAAC
TGCAGCTGAGCAAGGACACCTACGACGACGACCTGGACAACCTGCTGGCCCAGATC
GGCGACCAGTACGCCGACCTGTTTCTGGCCGCCAAGAACCTGTCCGACGCCATCCTG
CTGAGCGACATCCTGAGAGTGAACACCGAGATCACCAAGGCCCCCCTGAGCGCCTC
TATGATCAAGAGATACGACGAGCACCACCAGGACCTGACCCTGCTGAAAGCTCTCG
TGCGGCAGCAGCTGCCTGAGAAGTACAAAGAGATTTTCTTCGACCAGAGCAAGAAC
GGCTACGCCGGCTACATCGATGGCGGAGCCAGCCAGGAAGAGTTCTACAAGTTCAT
CAAGCCCATCCTGGAAAAGATGGACGGCACCGAGGAACTGCTCGTGAAGCTGAACA
GAGAGGACCTGCTGCGGAAGCAGCGGACCTTCGACAACGGCAGCATCCCCCACCAG
ATCCACCTGGGAGAGCTGCACGCCATTCTGCGGCGGCAGGAAGATTTTTACCCATTC
CTGAAGGACAACCGGGAAAAGATCGAGAAGATCCTGACCTTCCGCATCCCCTACTA
CGTGGGCCCTCTGGCCAGGGGAAACAGCAGATTCGCCTGGATGACCAGAAAGAGCG
AGGAAACCATCACCCCCTGGAACTTCGAGGAAGTGGTGGACAAGGGCGCCAGCGCC
CAGAGCTTCATCGAGCGGATGACCAACTTCGATAAGAACCTGCCCAACGAGAAGGT
GCTGCCCAAGCACAGCCTGCTGTACGAGTACTTCACCGTGTACAACGAGCTGACCA
AAGTGAAATACGTGACCGAGGGAATGAGAAAGCCCGCCTTCCTGAGCGGCGAGCAG
AAAAAAGCCATCGTGGACCTGCTGTTCAAGACCAACCGGAAAGTGACCGTGAAGCA
GCTGAAAGAGGACTACTTCAAGAAAATCGAGTGCTTCGACTCCGTGGAAATCTCCG
GCGTGGAAGATCGGTTCAACGCCTCCCTGGGCACATACCACGATCTGCTGAAAATTA
TCAAGGACAAGGACTTCCTGGACAATGAGGAAAACGAGGACATTCTGGAAGATATC
GTGCTGACCCTGACACTGTTTGAGGACAGAGAGATGATCGAGGAACGGCTGAAAAC
CTATGCCCACCTGTTCGACGACAAAGTGATGAAGCAGCTGAAGCGGCGGAGATACA
CCGGCTGGGGCAGGCTGAGCCGGAAGCTGATCAACGGCATCCGGGACAAGCAGTCC
GGCAAGACAATCCTGGATTTCCTGAAGTCCGACGGCTTCGCCAACAGAAACTTCATG
CAGCTGATCCACGACGACAGCCTGACCTTTAAAGAGGACATCCAGAAAGCCCAGGT
GTCCGGCCAGGGCGATAGCCTGCACGAGCACATTGCCAATCTGGCCGGCAGCCCCG
CCATTAAGAAGGGCATCCTGCAGACAGTGAAGGTGGTGGACGAGCTCGTGAAAGTG
ATGGGCCGGCACAAGCCCGAGAACATCGTGATCGAAATGGCCAGAGAGAACCAGA
CCACCCAGAAGGGACAGAAGAACAGCCGCGAGAGAATGAAGCGGATCGAAGAGGG
CATCAAAGAGCTGGGCAGCCAGATCCTGAAAGAACACCCCGTGGAAAACACCCAGC
TGCAGAACGAGAAGCTGTACCTGTACTACCTGCAGAATGGGCGGGATATGTACGTG
GACCAGGAACTGGACATCAACCGGCTGTCCGACTACGATGTGGACGCTATCGTGCC
TCAGAGCTTTCTGAAGGACGACTCCATCGATAACAAAGTGCTGACTCGGAGCGACA
AGAACCGGGGCAAGAGCGACAACGTGCCCTCCGAAGAGGTCGTGAAGAAGATGAA
GAACTACTGGCGCCAGCTGCTGAATGCCAAGCTGATTACCCAGAGGAAGTTCGACA
ATCTGACCAAGGCCGAGAGAGGCGGCCTGAGCGAACTGGATAAGGCCGGCTTCATC
AAGAGACAGCTGGTGGAAACCCGGCAGATCACAAAGCACGTGGCACAGATCCTGG
ACTCCCGGATGAACACTAAGTACGACGAGAACGACAAACTGATCCGGGAAGTGAAA
GTGATCACCCTGAAGTCCAAGCTGGTGTCCGATTTCCGGAAGGATTTCCAGTTTTAC
AAAGTGCGCGAGATCAACAACTACCACCACGCCCACGACGCCTACCTGAACGCCGT
CGTGGGAACCGCCCTGATCAAAAAGTACCCTAAGCTGGAAAGCGAGTTCGTGTACG
GCGACTACAAGGTGTACGACGTGCGGAAGATGATCGCCAAGAGCGAGCAGGAAATC
GGCAAGGCTACCGCCAAGTACTTCTTCTACAGCAACATCATGAACTTTTTCAAGACC
GAGATTACCCTGGCCAACGGCGAGATCCGGAAGCGGCCTCTGATCGAGACAAACGG
CGAAACAGGCGAGATCGTGTGGGATAAGGGCCGGGACTTTGCCACCGTGCGGAAAG
TGCTGTCTATGCCCCAAGTGAATATCGTGAAAAAGACCGAGGTGCAGACAGGCGGC
TTCAGCAAAGAGTCTATCCTGCCCAAGAGGAACAGCGACAAGCTGATCGCCAGAAA
GAAGGACTGGGACCCTAAGAAGTACGGCGGCTTCGACAGCCCCACCGTGGCCTATT
CTGTGCTGGTGGTGGCCAAAGTGGAAAAGGGCAAGTCCAAGAAACTGAAGAGTGTG
AAAGAGCTGCTGGGGATCACCATCATGGAAAGAAGCAGCTTCGAGAAGAATCCCAT
CGACTTTCTGGAAGCCAAGGGCTACAAAGAAGTGAAAAAGGACCTGATCATCAAGC
TGCCTAAGTACTCCCTGTTCGAGCTGGAAAACGGCCGGAAGAGAATGCTGGCCTCTG
CCGGCGAACTGCAGAAGGGAAACGAACTGGCCCTGCCCTCCAAATATGTGAACTTC
CTGTACCTGGCCAGCCACTATGAGAAGCTGAAGGGCTCCCCCGAGGATAATGAGCA
GAAACAGCTGTTTGTGGAACAGCACAAACACTACCTGGACGAGATCATCGAGCAGA
TCAGCGAGTTCTCCAAGAGAGTGATCCTGGCCGACGCTAATCTGGACAAGGTGCTG
AGCGCCTACAACAAGCACAGAGACAAGCCTATCAGAGAGCAGGCCGAGAATATCAT
CCACCTGTTTACCCTGACCAATCTGGGAGCCCCTGCCGCCTTCAAGTACTTTGACAC
CACCATCGACCGGAAGAGGTACACCAGCACCAAAGAGGTGCTGGACGCCACCCTGA
TCCACCAGAGCATCACCGGCCTGTACGAGACACGGATCGACCTGTCTCAGCTGGGA
GGCGACCTCGAGGGCGGATCCGGTGGTTCCGGAGGAGCTGTCGACATGGCGACTGT
CGAACCGGAAACCACCCCTACTCCTAATCCCCCGACTACAGAAGAGGAGAAAACGG
AATCTAATCAGGAGGTTGCTAACCCAGAACACTATATTAAACGGCCCCTACAGAAC
AGATGGGCACTCTGGTTTTTTAAAAATGATAAAAGCAAAACTTGGCAAGCAAACCT
GCGGCTGATCTCCAAGTTTGATACTGCTGAAGACTTTTTTGCTCTGTACAACCATATC
CAGTTGTCTAGTAATTTAATGCCTGGCTGTGACTACTCACTTTTTAAGGATGGTATTG
AGCCTATGTGGGAAGATGAGAAAAACAAACGGGGAGGACGATGGCTAATTACATTG
AACAAACAGCAGAGACGAAGTGACCTCGATCGCTTTTGGCTAGAGACACTTCTGTG
CCTTATTGGAGAATCTTTTGATGACTACAGTGATGATGTATGTGGCGCTGTTGTTAAT
GTTAGAGCTAAAGGTGATAAGATAGCAATATGGACTACTGAATGTGAAAACAGAGA
AGCTGTTACACATATAGGGAGGGTATACAAGGAAAGGTTAGGACTTCCTCCAAAGA
TAGTGATTGGTTATCAGTCCCACGCAGACACAGCTACTAAGAGCGGCGACACCACT
AAAAATAGGTTTGTTGTTTCTAGACTTAAGTAA

[0153] In other aspects, provided herein are fusion proteins comprising, consisting of, or consisting essentially of: (i) a guide nucleotide sequence-programmable RNA binding protein;

[0154] and (ii) a eukaryotic translation initiation factor 4E-binding protein 1 (EIF4E-BP1) protein. EIF4E-BP1 is part of a family of translation repressor proteins. In some embodiments, EIF4E-BP1 directly interacts with endogenous or exogenous EIF4E. Without being bound by theory, it is believed that the interaction of EIF4E-BP1 protein with EIF4E inhibits complex assembly and represses translation.

[0155] In some embodiments, the guide nucleotide sequence-programmable RNA binding protein is all or part of a protein selected from: Cas9, modified Cas9, Cas13a, Cas13b, CasRX/Cas13d, and a biological equivalent of each thereof. In some embodiments, the guide nucleotide sequence-programmable RNA binding protein is all or part of a protein selected from: Steptococcus pyogenes Cas9 (spCas9), Staphylococcus aureus Cas9 (saCas9), Francisella novicida Cas9 (FnCas9), Neisseria meningitidis Cas9 (nmCas9), Streptococcus thermophilus CRISPR 1 Cas9 (St1Cas9), Streptococcus thermophilus CRISPR 3 Cas9 (St3Cas9), and Brevibacillus laterosporus Cas9 (BlatCas9). In some embodiments, the guide nucleotide sequence-programmable RNA binding protein is nuclease inactive.

[0156] In some embodiments, the fusion protein further comprises, consists of, or consists essentially of a linker. In some embodiments, the linker is a peptide linker. In some embodiments, the peptide linker comprises one or more repeats of the tri-peptide GGS. In other embodiments, the linker is a non-peptide linker. In some embodiments, the non-peptide linker comprises polyethylene glycol (PEG), polypropylene glycol (PPG), co-poly(ethylene/propylene) glycol, polyoxyethylene (POE), polyurethane, polyphosphazene, polysaccharides, dextran, polyvinyl alcohol, polyvinylpyrrolidones, polyvinyl ethyl ether, polyacryl amide, polyacrylate, polycyanoacrylates, lipid polymers, chitins, hyaluronic acid, heparin, or an alkyl linker.

[0157] In some embodiments, the fusion protein comprises, consists of, or consists essentially of the structure NH₂-[EIF4E-BP1]-[linker]-[guide nucleotide sequence-programmable RNA binding protein]-COOH. In other embodiments, the fusion protein comprises, consists of, or consists essentially of the structure NH₂-[guide nucleotide sequence-programmable RNA binding protein]-[linker]-[EIF4E-BP1]-COOH.

[0158] In some embodiments, the guide nucleotide sequence-programmable RNA binding protein is bound to a guide RNA (gRNA), a crisprRNA (crRNA), and/or a trans-activating crRNA (tracrRNA).

[0159] In some embodiments, the EIF4E-BP1 protein is encoded by a polynucleotide having a sequence comprising all or part of SEQ ID NO: 61 or a biological equivalent thereof. In some embodiments, the EIF4E-BP1 protein has an amino acid sequence comprising all or part of SEQ ID NO: 62 or a biological equivalent thereof.

(NM_004095)
(SEQ ID NO: 61)
GGGGCGAGGCGGAGCGAGGCTGGAGGCGCGGGAGGGCAGCGAGAGGTTCG
CGGGTGCAGCGCACAGGAGACCATGTCCGGGGGCAGCAGCTGCAGCCAGA
CCCCAAGCCGGGCCATCCCCGCCACTCGCCGGGTGGTGCTCGGCGACGGC
GTGCAGCTCCCGCCCGGGGACTACAGCACGACCCCCGGCGGCACGCTCTT
CAGCACCACCCCGGGAGGTACCAGGATCATCTATGACCGGAAATTCCTGA
TGGAGTGTCGGAACTCACCTGTGACCAAAACACCCCCAAGGGATCTGCCC
ACCATTCCGGGGGTCACCAGCCCTTCCAGTGATGAGCCCCCCATGGAAGC
CAGCCAGAGCCACCTGCGCAATAGCCCAGAAGATAAGCGGGCGGGCGGTG
AAGAGTCACAGTTTGAGATGGACATTTAAAGCACCAGCCATCGTGTGGAG
CACTACCAAGGGGCCCCTCAGGGCCTTCCTGGGAGGAGTCCCACCAGCCA
GGCCTTATGAAAGTGATCATACTGGGCAGGCGTTGGCGTGGGGTCGGACA
CCCCAGCCCTTTCTCCCTCACTCAGGGCACCTGCCCCCTCCTCTTCGTGA
ACACCAGCAGATACCTCCTTGTGCCTCCACTGATGCAGGAGCTGCCACCC
CAAGGGGAGTGACCCCTGCCAGCACACCCTGCAGCCAAGGGCCAGGAAGT
GGACAAGAACGAACCCTTCCTTCCGAATGATCAGCAGTTCCAGCCCCTCG
CTGCTGGGGGCGCAACCACCCCTTCCTTAGGTTGATGTGCTTGGGAAAGC
TCCCTCCCCCTCCTTCCCCAAGAGAGGAAATAAAAGCCACCTTCGCCCTA
GGGCCAAGAAAAAAAAAAAAAAAAAAA
(NP_004086)
(SEQ ID NO: 62)
MSGGSSCSQTPSRAIPATRRVVLGDGVQLPPGDYSTTPGGTLFSTTPGGT
RIIYDRKFLMECRNSPVTKTPPRDLPTIPGVTSPSSDEPPMEASQSHLRN
SPEDKRAGGEESQFEMDI

[0160] Wild type EIF4E-BP1can be phosphorylated in response to various signals including UV irradiation and insulin signaling, resulting in its dissociation from EIF4E and activation of cap-dependent mRNA translation. In some embodiments, one or more kinase phosphorylation domains of the EIF4E-BP1 protein are mutated. In some embodiments, all kinase phosphorylation domains of the EIF4E-BP1 protein are mutated. In some embodiments, the mutation replaces the amino acid of the phosphorylation domain with a negatively charged amino acid such as aspartic acid or glutamic acid. In other embodiments, the mutation replaces the amino acid of the phosphorylation domain with an uncharged residue such alanine or glycine. In some embodiments, EIF4E-BP1 comprises one or more phosphomimetic mutations and/or mutations to reduce EIF4E-BP1′s interaction with mTOR kinase. In some embodiments, the EIF4E-BP1 protein comprises one or more mutations selected from the group consisting of: mutant FEMDI motif, mutant RAIP motif, mutant caspase site at residue 25, MT37A, T46A, S65A and T70A. In some embodiments, the mutated EIF4E-BP1 is constitutively active.

| Mutation | Type |
|---|---|
| Mutant FEMDI | Inhibits interaction with mTOR kinase |
| Mutant RAIP | Inhibits interaction with mTOR kinase |
| Mutant caspase | Caspase site regulation |
| site at residue 25 | |
| MT37A | Decouples EIF4E-BP1 regulation from |
| T46A | kinase signaling |
| S65A | |
| T70A | |

[0161] In some embodiments, the fusion protein is a dCas9-EIF4E-BP1 fusion protein encoded by a nucleic acid comprising the following nucleic acid sequence:

(SEQ ID NO: 63)
ATGGGTAAGCCTATCCCTAACCCTCTCCTCGGTCTCGATTCTACGGCTAGCATGGAC
AAGAAGTACAGCATCGGCCTGGCCATCGGCACCAACTCTGTGGGCTGGGCCGTGAT
CACCGACGAGTACAAGGTGCCCAGCAAGAAATTCAAGGTGCTGGGCAACACCGACC
GGCACAGCATCAAGAAGAACCTGATCGGCGCCCTGCTGTTCGACAGCGGAGAAACA
GCCGAGGCCACCCGGCTGAAGAGAACCGCCAGAAGAAGATACACCAGACGGAAGA
ACCGGATCTGCTATCTGCAAGAGATCTTCAGCAACGAGATGGCCAAGGTGGACGAC
AGCTTCTTCCACAGACTGGAAGAGTCCTTCCTGGTGGAAGAGGATAAGAAGCACGA
GCGGCACCCCATCTTCGGCAACATCGTGGACGAGGTGGCCTACCACGAGAAGTACC
CCACCATCTACCACCTGAGAAAGAAACTGGTGGACAGCACCGACAAGGCCGACCTG
CGGCTGATCTATCTGGCCCTGGCCCACATGATCAAGTTCCGGGGCCACTTCCTGATC
GAGGGCGACCTGAACCCCGACAACAGCGACGTGGACAAGCTGTTCATCCAGCTGGT
GCAGACCTACAACCAGCTGTTCGAGGAAAACCCCATCAACGCCAGCGGCGTGGACG
CCAAGGCCATCCTGTCTGCCAGACTGAGCAAGAGCAGACGGCTGGAAAATCTGATC
GCCCAGCTGCCCGGCGAGAAGAAGAATGGCCTGTTCGGCAACCTGATTGCCCTGAG
CCTGGGCCTGACCCCCAACTTCAAGAGCAACTTCGACCTGGCCGAGGATGCCAAAC
TGCAGCTGAGCAAGGACACCTACGACGACGACCTGGACAACCTGCTGGCCCAGATC
GGCGACCAGTACGCCGACCTGTTTCTGGCCGCCAAGAACCTGTCCGACGCCATCCTG
CTGAGCGACATCCTGAGAGTGAACACCGAGATCACCAAGGCCCCCCTGAGCGCCTC
TATGATCAAGAGATACGACGAGCACCACCAGGACCTGACCCTGCTGAAAGCTCTCG
TGCGGCAGCAGCTGCCTGAGAAGTACAAAGAGATTTTCTTCGACCAGAGCAAGAAC
GGCTACGCCGGCTACATCGATGGCGGAGCCAGCCAGGAAGAGTTCTACAAGTTCAT
CAAGCCCATCCTGGAAAAGATGGACGGCACCGAGGAACTGCTCGTGAAGCTGAACA
GAGAGGACCTGCTGCGGAAGCAGCGGACCTTCGACAACGGCAGCATCCCCCACCAG
ATCCACCTGGGAGAGCTGCACGCCATTCTGCGGCGGCAGGAAGATTTTTACCCATTC
CTGAAGGACAACCGGGAAAAGATCGAGAAGATCCTGACCTTCCGCATCCCCTACTA
CGTGGGCCCTCTGGCCAGGGGAAACAGCAGATTCGCCTGGATGACCAGAAAGAGCG
AGGAAACCATCACCCCCTGGAACTTCGAGGAAGTGGTGGACAAGGGCGCCAGCGCC
CAGAGCTTCATCGAGCGGATGACCAACTTCGATAAGAACCTGCCCAACGAGAAGGT
GCTGCCCAAGCACAGCCTGCTGTACGAGTACTTCACCGTGTACAACGAGCTGACCA
AAGTGAAATACGTGACCGAGGGAATGAGAAAGCCCGCCTTCCTGAGCGGCGAGCAG
AAAAAAGCCATCGTGGACCTGCTGTTCAAGACCAACCGGAAAGTGACCGTGAAGCA
GCTGAAAGAGGACTACTTCAAGAAAATCGAGTGCTTCGACTCCGTGGAAATCTCCG
GCGTGGAAGATCGGTTCAACGCCTCCCTGGGCACATACCACGATCTGCTGAAAATTA
TCAAGGACAAGGACTTCCTGGACAATGAGGAAAACGAGGACATTCTGGAAGATATC
GTGCTGACCCTGACACTGTTTGAGGACAGAGAGATGATCGAGGAACGGCTGAAAAC
CTATGCCCACCTGTTCGACGACAAAGTGATGAAGCAGCTGAAGCGGCGGAGATACA
CCGGCTGGGGCAGGCTGAGCCGGAAGCTGATCAACGGCATCCGGGACAAGCAGTCC
GGCAAGACAATCCTGGATTTCCTGAAGTCCGACGGCTTCGCCAACAGAAACTTCATG
CAGCTGATCCACGACGACAGCCTGACCTTTAAAGAGGACATCCAGAAAGCCCAGGT
GTCCGGCCAGGGCGATAGCCTGCACGAGCACATTGCCAATCTGGCCGGCAGCCCCG
CCATTAAGAAGGGCATCCTGCAGACAGTGAAGGTGGTGGACGAGCTCGTGAAAGTG
ATGGGCCGGCACAAGCCCGAGAACATCGTGATCGAAATGGCCAGAGAGAACCAGA
CCACCCAGAAGGGACAGAAGAACAGCCGCGAGAGAATGAAGCGGATCGAAGAGGG
CATCAAAGAGCTGGGCAGCCAGATCCTGAAAGAACACCCCGTGGAAAACACCCAGC
TGCAGAACGAGAAGCTGTACCTGTACTACCTGCAGAATGGGCGGGATATGTACGTG
GACCAGGAACTGGACATCAACCGGCTGTCCGACTACGATGTGGACGCTATCGTGCC
TCAGAGCTTTCTGAAGGACGACTCCATCGATAACAAAGTGCTGACTCGGAGCGACA
AGAACCGGGGCAAGAGCGACAACGTGCCCTCCGAAGAGGTCGTGAAGAAGATGAA
GAACTACTGGCGCCAGCTGCTGAATGCCAAGCTGATTACCCAGAGGAAGTTCGACA
ATCTGACCAAGGCCGAGAGAGGCGGCCTGAGCGAACTGGATAAGGCCGGCTTCATC
AAGAGACAGCTGGTGGAAACCCGGCAGATCACAAAGCACGTGGCACAGATCCTGG
ACTCCCGGATGAACACTAAGTACGACGAGAACGACAAACTGATCCGGGAAGTGAAA
GTGATCACCCTGAAGTCCAAGCTGGTGTCCGATTTCCGGAAGGATTTCCAGTTTTAC
AAAGTGCGCGAGATCAACAACTACCACCACGCCCACGACGCCTACCTGAACGCCGT
CGTGGGAACCGCCCTGATCAAAAAGTACCCTAAGCTGGAAAGCGAGTTCGTGTACG
GCGACTACAAGGTGTACGACGTGCGGAAGATGATCGCCAAGAGCGAGCAGGAAATC
GGCAAGGCTACCGCCAAGTACTTCTTCTACAGCAACATCATGAACTTTTTCAAGACC
GAGATTACCCTGGCCAACGGCGAGATCCGGAAGCGGCCTCTGATCGAGACAAACGG
CGAAACAGGCGAGATCGTGTGGGATAAGGGCCGGGACTTTGCCACCGTGCGGAAAG
TGCTGTCTATGCCCCAAGTGAATATCGTGAAAAAGACCGAGGTGCAGACAGGCGGC
TTCAGCAAAGAGTCTATCCTGCCCAAGAGGAACAGCGACAAGCTGATCGCCAGAAA
GAAGGACTGGGACCCTAAGAAGTACGGCGGCTTCGACAGCCCCACCGTGGCCTATT
CTGTGCTGGTGGTGGCCAAAGTGGAAAAGGGCAAGTCCAAGAAACTGAAGAGTGTG
AAAGAGCTGCTGGGGATCACCATCATGGAAAGAAGCAGCTTCGAGAAGAATCCCAT
CGACTTTCTGGAAGCCAAGGGCTACAAAGAAGTGAAAAAGGACCTGATCATCAAGC
TGCCTAAGTACTCCCTGTTCGAGCTGGAAAACGGCCGGAAGAGAATGCTGGCCTCTG
CCGGCGAACTGCAGAAGGGAAACGAACTGGCCCTGCCCTCCAAATATGTGAACTTC
CTGTACCTGGCCAGCCACTATGAGAAGCTGAAGGGCTCCCCCGAGGATAATGAGCA
GAAACAGCTGTTTGTGGAACAGCACAAACACTACCTGGACGAGATCATCGAGCAGA
TCAGCGAGTTCTCCAAGAGAGTGATCCTGGCCGACGCTAATCTGGACAAGGTGCTG
AGCGCCTACAACAAGCACAGAGACAAGCCTATCAGAGAGCAGGCCGAGAATATCAT
CCACCTGTTTACCCTGACCAATCTGGGAGCCCCTGCCGCCTTCAAGTACTTTGACAC
CACCATCGACCGGAAGAGGTACACCAGCACCAAAGAGGTGCTGGACGCCACCCTGA
TCCACCAGAGCATCACCGGCCTGTACGAGACACGGATCGACCTGTCTCAGCTGGGA
GGCGACCTCGAGGGCGGATCCGGTGGTTCCGGAGGAGCTGTCGACATGTCCGGGGG
CAGCAGCTGCAGCCAGACCCCAAGCGCTGCCGCAGCCGCCACTCGCCGGGTGGTGC
TCGGCGCCGGCGTGCAGCTCCCGCCCGGGGACTACAGCACGGCCCCCGGCGGCACG
CTCTTCAGCACCGCCCCGGGAGGTACCAGGATCATCTATGACCGGAAATTCCTGATG
GAGTGTCGGAACGCACCTGTGACCAAAGCACCCCCAAGGGATCTGCCCACCATTCC
GGGGGTCACCAGCCCTTCCAGTGATGAGCCCCCCATGGAAGCCAGCCAGAGCCACC
TGCGCAATAGCCCAGAAGATAAGCGGGCGGGCGGTGAAGAGTCACAGGCTGAGAT
GGACATTTCTAGACTTAAG

[0162] In other aspects, provided herein are fusion proteins comprising, consisting of, or consisting essentially of: (i) a guide nucleotide sequence-programmable RNA binding protein; and (ii) a ubiquitin-associated protein 2-like (UBAP2L) protein.

[0163] In some embodiments, the guide nucleotide sequence-programmable RNA binding protein is all or part of a protein selected from: Cas9, modified Cas9, Cas13a, Cas13b, CasRX/Cas13d, and a biological equivalent of each thereof. In some embodiments, the guide nucleotide sequence-programmable RNA binding protein is all or part of a protein selected from: Steptococcus pyogenes Cas9 (spCas9), Staphylococcus aureus Cas9 (saCas9), Francisella novicida Cas9 (FnCas9), Neisseria meningitidis Cas9 (nmCas9), Streptococcus thermophilus CRISPR 1 Cas9 (St1Cas9), Streptococcus thermophilus CRISPR 3 Cas9 (St3Cas9), and Brevibacillus laterosporus Cas9 (BlatCas9). In some embodiments, the guide nucleotide sequence-programmable RNA binding protein is nuclease inactive.

[0164] In some embodiments, the fusion protein further comprises, consists of, or consists essentially of a linker. In some embodiments, the linker is a peptide linker. In some embodiments, the peptide linker comprises one or more repeats of the tri-peptide GGS. In other embodiments, the linker is a non-peptide linker. In some embodiments, the non-peptide linker comprises polyethylene glycol (PEG), polypropylene glycol (PPG), co-poly(ethylene/propylene) glycol, polyoxyethylene (POE), polyurethane, polyphosphazene, polysaccharides, dextran, polyvinyl alcohol, polyvinylpyrrolidones, polyvinyl ethyl ether, polyacryl amide, polyacrylate, polycyanoacrylates, lipid polymers, chitins, hyaluronic acid, heparin, or an alkyl linker.

[0165] In some embodiments, the fusion protein comprises, consists of, or consists essentially of the structure NH₂-[UBAP2L]-[linker]-[guide nucleotide sequence-programmable RNA binding protein]-COOH. In other embodiments, the fusion protein comprises, consists of, or consists essentially of the structure NH₂-[guide nucleotide sequence-programmable RNA binding protein]-[linker]-[UBAP2L]-COOH.

[0166] In some embodiments, the guide nucleotide sequence-programmable RNA binding protein is bound to a guide RNA (gRNA), a crisprRNA (crRNA), and/or a trans-activating crRNA (tracrRNA).

[0167] In some embodiments, the UBAP2L protein is encoded by a polynucleotide having a sequence comprising all or part of a sequence selected from SEQ ID NO: 64, SEQ ID NO: 65, SEQ ID NO: 66, SEQ ID NO: 67 and a biological equivalent thereof.

(NM_014847.4) Homo sapiens ubiquitin associated
protein 2 like (UBAP2L), transcript variant 1
(SEQ ID NO: 64)
GTCAGTGTGGAGGAGACTGAGTATTCTACCTTGTAAATACT
GTTATTTGTATATACTGTAAATGATGACATCGGTGGGCACT
AACCGAGCCCGGGGAAACTGGGAACAACCTCAAAACCAAAA
CCAGACACAGCACAAGCAGCGGCCACAGGCCACTGCAGAAC
AAATTAGACTTGCACAGATGATTTCGGACCATAATGATGCT
GACTTTGAGGAGAAGGTGAAACAATTGATTGAGATAACAGG
CAAGAACCAGGATGAATGTGTGATTGCTTTGCATGACTGCA
ATGGAGATGTCAACAGAGCTATCAATGTTCTTCTGGAAGGA
AACCCAGACACGCATTCCTGGGAGATGGTCGGGAAGAAGAA
GGGAGTCTCAGGCCAGAAGGATGGTGGCCAGACGGAATCCA
ATGAGGAAGGCAAAGAAAATCGAGACCGGGACAGAGACTAT
AGTCGGCGACGTGGTGGGCCACCAAGACGGGGGAGAGGTGC
CAGCCGTGGACGAGAGTTTCGAGGTCAGGAAAATGGATTGG
ATGGCACCAAGAGTGGAGGGCCTTCTGGAAGAGGAACAGAA
AGAGGCAGAAGGGGCCGTGGCCGAGGCAGAGGTGGCTCTGG
TAGGCGAGGAGGAAGGTTTTCTGCTCAAGGAATGGGAACCT
TTAACCCAGCTGATTATGCAGAGCCAGCCAATACTGATGAT
AACTATGGCAATAGCAGCGGCAATACGTGGAACAACACTGG
CCACTTTGAACCAGATGATGGGACGAGTGCATGGAGGACTG
CAACAGAGGAGTGGGGGACTGAAGATTGGAATGAAGATCTT
TCTGAGACCAAGATCTTCACTGCCTCTAATGTGTCTTCAGT
GCCTCTGCCTGCGGAGAATGTGACAATCACTGCTGGTCAGA
GAATTGACCTTGCTGTTCTGCTGGGGAAGACACCATCTACA
ATGGAGAATGATTCATCTAATCTGGATCCGTCTCAGGCTCC
TTCTCTGGCCCAGCCTCTGGTGTTCAGTAATTCGAAGCAGA
CTGCCATATCACAGCCTGCTTCAGGGAACACATTTTCTCAT
CACAGTATGGTGAGCATGTTAGGGAAAGGATTTGGTGATGT
CGGTGAAGCTAAAGGCGGCAGTACTACAGGCTCCCAGTTCT
TGGAGCAATTCAAGACTGCCCAAGCCCTGGCTCAGTTGGCA
GCTCAGCATTCTCAGTCTGGAAGCACCACCACCTCCTCTTG
GGACATGGGCTCGACGACACAATCCCCATCACTGGTGCAGT
ATGATTTGAAGAACCCAAGTGATTCAGCAGTGCACAGCCCC
TTTACAAAGCGCCAGGCTTTTACCCCATCTTCAACCATGAT
GGAGGTGTTCCTTCAGGAGAAGTCACCTGCAGTGGCTACCT
CCACAGCTGCACCTCCACCTCCGTCTTCTCCTCTGCCAAGC
AAATCCACATCGGCTCCACAGATGTCGCCTGGATCTTCAGA
CAACCAGTCCTCTAGCCCTCAGCCGGCTCAGCAGAAACTGA
AACAGCAGAAGAAAAAAGCCTCCTTGACTTCTAAGATTCCT
GCTCTGGCTGTGGAGATGCCTGGCTCAGCAGATATCTCAGG
GCTAAACCTGCAGTTTGGGGCATTGCAGTTTGGGTCAGAGC
CTGTCCTTTCTGATTATGAGTCCACCCCCACCACGAGCGCC
TCTTCAAGCCAGGCTCCAAGTAGCCTGTATACCAGCACGGC
CAGTGAATCATCCTCTACAATTTCATCTAACCAGAGTCAGG
AGTCTGGTTATCAGAGCGGCCCAATTCAGTCGACAACCTAT
ACCTCCCAAAATAATGCTCAGGGCCCTCTTTATGAACAGAG
ATCCACACAGACTCGGCGGTACCCCAGCTCCATCTCTTCAT
CACCCCAAAAGGACCTGACTCAGGCAAAGAATGGCTTCAGT
TCTGTGCAGGCCACGCAGTTACAGACCACACAATCTGTTGA
AGGTGCTACAGGCTCTGCAGTGAAATCTGATTCACCTTCCA
CTTCTAGCATCCCCCCTCTCAATGAAACGGTATCTGCAGCT
TCCTTACTGACGACAACCAATCAGCATTCATCCTCCTTGGG
TGGCTTGAGCCACAGTGAGGAGATTCCAAATACTACCACCA
CACAACACAGCAGCACGTTATCTACGCAGCAGAATACCCTT
TCATCATCAACATCTTCTGGGCGCACTTCGACATCCACTCT
TTTGCACACAAGTGTGGAGAGTGAGGCGAATCTCCATTCTT
CCTCCAGCACTTTTTCCACCACATCCAGCACAGTCTCTGCA
CCTCCCCCAGTGGTCAGTGTCTCCTCCAGTCTCAATAGTGG
CAGTAGCCTGGGCCTCAGCCTAGGCAGCAACTCCACTGTCA
CAGCCTCGACTCGAAGCTCAGTTGCTACGACTTCAGGAAAA
GCTCCTCCCAACCTCCCTCCTGGGGTCCCGCCGTTGTTGCC
TAATCCGTATATTATGGCTCCAGGGCTGTTACATGCCTACC
CGCCACAAGTATATGGTTATGATGACTTGCAGATGCTTCAG
ACAAGATTTCCATTGGATTACTACAGCATCCCATTTCCCAC
ACCCACTACTCCGCTGACTGGGAGGGATGGTAGCCTGGCCA
GCAACCCTTATTCTGGTGACCTCACAAAGTTCGGCCGTGGG
GATGCCTCCTCCCCAGCCCCGGCCACAACCTTGGCCCAACC
CCAACAGAACCAGACGCAGACTCACCATACCACGCAGCAGA
CATTCCTGAACCCGGCGCTGCCTCCTGGCTACAGTTACACC
AGCCTGCCATACTATACAGGGGTCCCGGGCCTCCCCAGCAC
CTTCCAGTATGGGCCTGCTGTGTTCCCTGTGGCTCCTACCT
CTTCCAAGCAGCATGGTGTGAATGTCAGTGTGAATGCATCG
GCCACCCCTTTCCAACAGCCGAGTGGATATGGGTCTCATGG
ATACAACACTGGTGTTTCAGTCACCTCCAGTAACACGGGCG
TGCCAGATATCTCGGGTTCTGTGTACTCCAAAACCCAGCAG
TCCTTTGAGAAACAAGGTTTTCATTCCGGTACTCCTGCTGC
TTCCTTCAACTTGCCTTCAGCCCTAGGAAGTGGGGGCCCCA
TCAATCCGGCCACAGCTGCTGCCTACCCACCTGCCCCCTTT
ATGCACATTCTGACCCCCCATCAGCAGCCGCATTCTCAGAT
CCTTCACCATCACCTGCAGCAGGATGGCCAGACGGGCAGCG
GGCAACGTAGCCAGACCAGCTCCATCCCGCAGAAGCCCCAG
ACCAACAAGTCTGCCTACAACAGCTACAGCTGGGGGGCCAA
CTGAGGCCCTGACCCTCTTCTCCCGGTCCCATCTTCTGAGA
GGGCTTCTCAGCCTGGAAACTATGGAAACAGCATCAAAGAG
AAAGGAATGTGGGGGGTTTCCGCTGCCCCCCACCCCCAGCG
GCCCACCCCATGCCTCAGCTTCATGTCTGTCCCATTCCTAT
ACCATCCCCACCCTGTTGTATGTATTATAGGATTTGTATTT
TCTCCTTTTTTTTCCCCCTTCCATTCCTTCTCCCCTCTTGC
ATTCAAGATTATGAAACTTTGCTATGGGCCCTGCACTTCCT
TTGCTTCCTCCTGTTCACCCTGGTGGTGTACGGATGAGGCG
GGGAGGTGGGACCCCCAAACATATATCAGCCCAACAGCCCT
AAGTCTCCTTCTTTATTATTAGGAAAACAACAACAACAACA
AACAAAAAAATGGCGTCATGAATATGAACAGCATTGTCAGA
TGAATTAGTTGAAGTGGTTTTTTTTTTGTTTTTTTTTTTTT
TTTGTACTGTGTCCTCAAATTTAATGGATTAATGTGTCTTG
TATATATAAAAAGAAAACCTCTA
(NM_001127320.2) Homo sapiens ubiquitin associated
protein 2 like (UBAP2L), transcript variant 2
(SEQ ID NO: 65)
GGGTCGGCCCGACTAAGTGACTTAAACTCCCACCTACTCCT
GGAATAAGGAGTCAAAGCCCGGATAGGCGCAGTATTCTACC
TTGTAAATACTGTTATTTGTATATACTGTAAATGATGACAT
CGGTGGGCACTAACCGAGCCCGGGGAAACTGGGAACAACCT
CAAAACCAAAACCAGACACAGCACAAGCAGCGGCCACAGGC
CACTGCAGAACAAATTAGACTTGCACAGATGATTTCGGACC
ATAATGATGCTGACTTTGAGGAGAAGGTGAAACAATTGATT
GATATTACAGGCAAGAACCAGGATGAATGTGTGATTGCTTT
GCATGACTGCAATGGAGATGTCAACAGAGCTATCAATGTTC
TTCTGGAAGGAAACCCAGACACGCATTCCTGGGAGATGGTC
GGGAAGAAGAAGGGAGTCTCAGGCCAGAAGGATGGTGGCCA
GACGGAATCCAATGAGGAAGGCAAAGAAAATCGAGACCGGG
ACAGAGACTATAGTCGGCGACGTGGTGGGCCACCAAGACGG
GGGAGAGGTGCCAGCCGTGGACGAGAGTTTCGAGGTCAGGA
AAATGGATTGGATGGCACCAAGAGTGGAGGGCCTTCTGGAA
GAGGAACAGAAAGAGGCAGAAGGGGCCGTGGCCGAGGCAGA
GGTGGCTCTGGTAGGCGAGGAGGAAGGTTTTCTGCTCAAGG
AATGGGAACCTTTAACCCAGCTGATTATGCAGAGCCAGCCA
ATACTGATGATAACTATGGCAATAGCAGCGGCAATACGTGG
AACAACACTGGCCACTTTGAACCAGATGATGGGACGAGTGC
ATGGAGGACTGCAACAGAGGAGTGGGGGACTGAAGATTGGA
ATGAAGATCTCTTTGAGACCAAGATCTTCACTGCCTCTAAT
GTGTCTTCAGTGCCTCTGCCTGCGGAGAATGTGACAATCAC
TGCTGGTCAGAGAATTGACCTTGCTGTTCTGCTGGGGAAGA
CACCATCTACAATGGAGAATGATTCATCTAATCTGGATCCG
TCTCAGGCTCCTTCTCTGGCCCAGCCTCTGGTGTTCAGTAA
TTCGAAGCAGACTGCCATATCACAGCCTGCTTCAGGGAACA
CATTTTCTCATCACAGTATGGTGAGCATGTTAGGGAAAGGA
TTTGGTGATGTCGGTGAAGCTAAAGGCGGCAGTACTACAGG
CTCCCAGTTCTTGGAGCAATTCAAGACTGCCCAAGCCCTGG
CTCAGTTGGCAGCTCAGCATTCTCAGTCTGGAAGCACCACC
ACCTCCTCTTGGGACATGGGCTCGACGACACAATCCCCATC
ACTGGTGCAGTATGATTTGAAGAACCCAAGTGATTCAGCAG
TGCACAGCCCCTTTACAAAGCGCCAGGCTTTTACCCCATCT
TCAACCATGATGGAGGTGTTCCTTCAGGAGAAGTCACCTGC
AGTGGCTACCTCCACAGCTGCACCTCCACCTCCGTCTTCTC
CTCTGCCAAGCAAATCCACATCGGCTCCACAGATGTCGCCT
GGATCTTCAGACAACCAGTCCTCTAGCCCTCAGCCGGCTCA
GCAGAAACTGAAACAGCAGAAGAAAAAAGCCTCCTTGACTT
CTAAGATTCCTGCTCTGGCTGTGGAGATGCCTGGCTCAGCA
GATATCTCAGGGCTAAACCTGCAGTTTGGGGCATTGCAGTT
TGGGTCAGAGCCTGTCCTTTCTGATTATGAGTCCACCCCCA
CCACGAGCGCCTCTTCAAGCCAGGCTCCAAGTAGCCTGTAT
ACCAGCACGGCCAGTGAATCATCCTCTACAATTTCATCTAA
CCAGAGTCAGGAGTCTGGTTATCAGAGCGGCCCAATTCAGT
CGACAACCTATACCTCCCAAAATAATGCTCAGGGCCCTCTT
TATGAACAGAGATCCACACAGACTCGGCGGTACCCCAGCTC
CATCTCTTCATCACCCCAAAAGGACCTGACTCAGGCAAAGA
ATGGCTTCAGTTCTGTGCAGGCCACGCAGTTACAGACCACA
CAATCTGTTGAAGGTGCTACAGGCTCTGCAGTGAAATCTGA
TTCACCTTCCACTTCTAGCATCCCCCCTCTCAATGAAACGG
TATCTGCAGCTTCCTTACTGACGACAACCAATCAGCATTCA
TCCTCCTTGGGTGGCTTGAGCCACAGTGAGGAGATTCCAAA
TACTACCACCACACAACACAGCAGCACGTTATCTACGCAGC
AGAATACCCTTTCATCATCAACATCTTCTGGGCGCACTTCG
ACATCCACTCTTTTGCACACAAGTGTGGAGAGTGAGGCGAA
TCTCCATTCTTCCTCCAGCACTTTTTCCACCACATCCAGCA
CAGTCTCTGCACCTCCCCCAGTGGTCAGTGTCTCCTCCAGT
CTCAATAGTGGCAGTAGCCTGGGCCTCAGCCTAGGCAGCAA
CTCCACTGTCACAGCCTCGACTCGAAGCTCAGTTGCTACGA
CTTCAGGAAAAGCTCCTCCCAACCTCCCTCCTGGGGTCCCG
CCGTTGTTGCCTAATCCGTATATTATGGCTCCAGGGCTGTT
ACATGCCTACCCGCCACAAGTATATGGTTATGATGACTTGC
AGATGCTTCAGACAAGATTTCCATTGGATTACTACAGCATC
CCATTTCCCACACCCACTACTCCGCTGACTGGGAGGGATGG
TAGCCTGGCCAGCAACCCTTATTCTGGTGACCTCACAAAGT
TCGGCCGTGGGGATGCCTCCTCCCCAGCCCCGGCCACAACC
TTGGCCCAACCCCAACAGAACCAGACGCAGACTCACCATAC
CACGCAGCAGACATTCCTGAACCCGGCGCTGCCTCCTGGCT
ACAGTTACACCAGCCTGCCATACTATACAGGGGTCCCGGGC
CTCCCCAGCACCTTCCAGTATGGGCCTGCTGTGTTCCCTGT
GGCTCCTACCTCTTCCAAGCAGCATGGTGTGAATGTCAGTG
TGAATGCATCGGCCACCCCTTTCCAACAGCCGAGTGGATAT
GGGTCTCATGGATACAACACTGGAAGAAAATATCCACCCCC
TTACAAGCATTTCTGGACGGCTGAGAGCTAATTTGGCCCAA
GGCTGGGGGCTGTGTTTTGTGTGTGTGTATAAATTTGCACT
GAAGTCTTGTTTCAGAAACCAGACCACTGAGGAGAGCCTGC
TGAGCTGAGGCCATGGCCTGCGTGGCTTGGGGAAATGAGTT
GGTGGATACCTTCTGGGCTTTTGAACTTGCCCCTCCCCCAT
TTCCCTCTCCCCCATGTGTCTGACCCTGTCTTACCCATTTC
AAGTTCAAGCGGTGCAGCACCTTCGAAGCATCAATGCACAC
ACCTGCTGTTGCTTTTGATTTCTGGAAGGCATGTAGTTTCA
ACGTAACAAAAATATGTAGTCCAATAAACTGTGGT
ATTTCTTTAGCTAAC
(NM_001287815.1) Homo sapiens ubiquitin associated
protein 2 like (UBAP2L), transcript variant 3
(SEQ ID NO: 66)
AAGTGGGCGGGGGAAGGCGCGAGAGCGAGCGCGAGAGGGAA
AAGGAGGGAGGGGGTGGGGAAGAGGGAATCTTATATCACGT
GACAGGGGCGGCGCGGCCCGGGGTGTCAGTGTGGAGGAGAC
TGAGTATTCTACCTTGTAAATACTGTTATTTGTATATACTG
TAAATGATGACATCGGTGGGCACTAACCGAGCCCGGGGAAA
CTGGGAACAACCTCAAAACCAAAACCAGACACAGCACAAGC
AGCGGCCACAGGCCACTGCAGAACAAATTAGACTTGCACAG
ATGATTTCGGACCATAATGATGCTGACTTTGAGGAGAAGGT
GAAACAATTGATTGATATTACAGGCAAGAACCAGGATGAAT
GTGTGATTGCTTTGCATGACTGCAATGGAGATGTCAACAGA
GCTATCAATGTTCTTCTGGAAGGAAACCCAGACACGCATTC
CTGGGAGATGGTCGGGAAGAAGAAGGGAGTCTCAGGCCAGA
AGGATGGTGGCCAGACGGAATCCAATGAGGAAGGCAAAGAA
AATCGAGACCGGGACAGAGACTATAGTCGGCGACGTGGTGG
GCCACCAAGACGGGGGAGAGTTCGAGGTCAGGAAAATGGAT
TGGATGGCACCAAGAGTGGAGGGCCTTCTGGAAGAGGAACA
GAAAGAGGCAGAAGGGGCCGTGGCCGAGGCAGAGGTGGCTC
TGGTAGGCGAGGAGGAAGGTTTTCTGCTCAAGGAATGGGAA
CCTTTAACCCAGCTGATTATGCAGAGCCAGCCAATACTGAT
GATAACTATGGCAATAGCAGCGGCAATACGTGGAACAACAC
TGGCCACTTTGAACCAGATGATGGGACGAGTGCATGGAGGA
CTGCAACAGAGGAGTGGGGGACTGAAGATTGGAATGAAGAT
CTTTCTGAGACCAAGATCTTCACTGCCTCTAATGTGTCTTC
AGTGCCTCTGCCTGCGGAGAATGTGACAATCACTGCTGGTC
AGAGAATTGACCTTGCTGTTCTGCTGGGGAAGACACCATCT
ACAATGGAGAATGATTCATCTAATCTGGATCCGTCTCAGGC
TCCTTCTCTGGCCCAGCCTCTGGTGTTCAGTAATTCGAAGC
AGACTGCCATATCACAGCCTGCTTCAGGGAACACATTTTCT
CATCACAGTATGGTGAGCATGTTAGGGAAAGGATTTGGTGA
TGTCGGTGAAGCTAAAGGCGGCAGTACTACAGGCTCCCAGT
TCTTGGAGCAATTCAAGACTGCCCAAGCCCTGGCTCAGTTG
GCAGCTCAGCATTCTCAGTCTGGAAGCACCACCACCTCCTC
TTGGGACATGGGCTCGACGACACAATCCCCATCACTGGTGC
AGTATGATTTGAAGAACCCAAGTGATTCAGCAGTGCACAGC
CCCTTTACAAAGCGCCAGGCTTTTACCCCATCTTCAACCAT
GATGGAGGTGTTCCTTCAGGAGAAGTCACCTGCAGTGGCTA
CCTCCACAGCTGCACCTCCACCTCCGTCTTCTCCTCTGCCA
AGCAAATCCACATCGGCTCCACAGATGTCGCCTGGATCTTC
AGACAACCAGTCCTCTAGCCCTCAGCCGGCTCAGCAGAAAC
TGAAACAGCAGAAGAAAAAAGCCTCCTTGACTTCTAAGATT
CCTGCTCTGGCTGTGGAGATGCCTGGCTCAGCAGATATCTC
AGGGCTAAACCTGCAGTTTGGGGCATTGCAGTTTGGGTCAG
AGCCTGTCCTTTCTGATTATGAGTCCACCCCCACCACGAGC
GCCTCTTCAAGCCAGGCTCCAAGTAGCCTGTATACCAGCAC
GGCCAGTGAATCATCCTCTACAATTTCATCTAACCAGAGTC
AGGAGTCTGGTTATCAGAGCGGCCCAATTCAGTCGACAACC
TATACCTCCCAAAATAATGCTCAGGGCCCTCTTTATGAACA
GAGATCCACACAGACTCGGCGGTACCCCAGCTCCATCTCTT
CATCACCCCAAAAGGACCTGACTCAGGCAAAGAATGGCTTC
AGTTCTGTGCAGGCCACGCAGTTACAGACCACACAATCTGT
TGAAGGTGCTACAGGCTCTGCAGTGAAATCTGATTCACCTT
CCACTTCTAGCATCCCCCCTCTCAATGAAACGGTATCTGCA
GCTTCCTTACTGACGACAACCAATCAGCATTCATCCTCCTT
GGGTGGCTTGAGCCACAGTGAGGAGATTCCAAATACTACCA
CCACACAACACAGCAGCACGTTATCTACGCAGCAGAATACC
CTTTCATCATCAACATCTTCTGGGCGCACTTCGACATCCAC
TCTTTTGCACACAAGTGTGGAGAGTGAGGCGAATCTCCATT
CTTCCTCCAGCACTTTTTCCACCACATCCAGCACAGTCTCT
GCACCTCCCCCAGTGGTCAGTGTCTCCTCCAGTCTCAATAG
TGGCAGTAGCCTGGGCCTCAGCCTAGGCAGCAACTCCACTG
TCACAGCCTCGACTCGAAGCTCAGTTGCTACGACTTCAGGA
AAAGCTCCTCCCAACCTCCCTCCTGGGGTCCCGCCGTTGTT
GCCTAATCCGTATATTATGGCTCCAGGGCTGTTACATGCCT
ACCCGCCACAAGTATATGGTTATGATGACTTGCAGATGCTT
CAGACAAGATTTCCATTGGATTACTACAGCATCCCATTTCC
CACACCCACTACTCCGCTGACTGGGAGGGATGGTAGCCTGG
CCAGCAACCCTTATTCTGGTGACCTCACAAAGTTCGGCCGT
GGGGATGCCTCCTCCCCAGCCCCGGCCACAACCTTGGCCCA
ACCCCAACAGAACCAGACGCAGACTCACCATACCACGCAGC
AGACATTCCTGAACCCGGCGCTGCCTCCTGGCTACAGTTAC
ACCAGCCTGCCATACTATACAGGGGTCCCGGGCCTCCCCAG
CACCTTCCAGTATGGGCCTGCTGTGTTCCCTGTGGCTCCTA
CCTCTTCCAAGCAGCATGGTGTGAATGTCAGTGTGAATGCA
TCGGCCACCCCTTTCCAACAGCCGAGTGGATATGGGTCTCA
TGGATACAACACTGGAAGAAAATATCCACCCCCTTACAAGC
ATTTCTGGACGGCTGAGAGCTAATTTGGCCCAAGGCTGGGG
GCTGTGTTTTGTGTGTGTGTATAAATTTGCACTGAAGTCTT
GTTTCAGAAACCAGACCACTGAGGAGAGCCTGCTGAGCTGA
GGCCATGGCCTGCGTGGCTTGGGGAAATGAGTTGGTGGATA
CCTTCTGGGCTTTTGAACTTGCCCCTCCCCCATTTCCCTCT
CCCCCATGTGTCTGACCCTGTCTTACCCATTTCAAGTTCAA
GCGGTGCAGCACCTTCGAAGCATCAATGCACACACCTGCTG
TTGCTTTTGATTTCTGGAAGGCATGTAGTTTCAACTTGTAA
CAAAAATATTTGTAGTCTTCAATAAACTGTGGTATTTCTTT
AGCTAAC
(NM_001287816.1) Homo sapiens ubiquitin associated
protein 2 like (UBAP2L), transcript variant 4
(SEQ ID NO: 67)
AAGTGGGCGGGGGAAGGCGCGAGAGCGAGCGCGAGAGGGAA
AAGGAGGGAGGGGGTGGGGAAGAGGGAATCTTATATCACGT
GACAGGGGCGGCGCGGCCCGGGGTGTCAGTGTGGAGGAGAC
TGAGTATTCTACTTCGTAAATACTGTTATTTGTATATACTG
TAAATGATGACATCGGTGGGCACTAACCGAGCCCGGGGAAA
CTGGGAACAACCTCAAAACCAAAACCAGACACAGCACAAGC
AGCGGCCACAGGCCACTGCAGAACAAATTAGACTTGCACAG
ATGATTTCGGACCATAATGATGCTGACTTTGAGGAGAAGGT
GAAACAATTGATTGATATTACAGGCAAGAACCAGGATGAAT
GTGTGATTGCTTTGCATGACTGCAATGGAGATGTCAACAGA
GCTATCAATGTTCTTCTGGAAGGAAACCCAGACACGCATTC
CTGGGAGATGGTCGGGAAGAAGAAGGGAGTCTCAGGCCAGA
AGGATGGTGGCCAGACGGAATCCAATGAGGAAGGCAAAGAA
AATCGAGACCGGGACAGAGACTATAGTCGGCGACGTGGTGG
GCCACCAAGACGGGGGAGAGGTGCCAGCCGTGGACGAGAGT
GTATGCATGGGGCTTTATCAAAACCAGCTGTGGTTCGAGGT
CAGGAAAATGGATTGGATGGCACCAAGAGTGGAGGGCCTTC
TGGAAGAGGAACAGAAAGAGGCAGAAGGGGCCGTGGCCGAG
GCAGAGGTGGCTCTGGTAGGCGAGGAGGAAGGTTTTCTGCT
CAAGGAATGGGAACCTTTAACCCAGCTGATTATGCAGAGCC
AGCCAATACTGATGATAACTATGGCAATAGCAGCGGCAATA
CGTGGAACAACACTGGCCACTTTGAACCAGATGATGGGACG
AGTGCATGGAGGACTGCAACAGAGGAGTGGGGGACTGAAGA
TTGGAATGAAGATCTTTCTGAGACCAAGATCTTCACTGCCT
CTAATGTGTCTTCAGTGCCTCTGCCTGCGGAGAATGTGACA
ATCACTGCTGGTCAGAGAATTGACCTTGCTGTTCTGCTGGG
GAAGACACCATCTACAATGGAGAATGATTCATCTAATCTGG
ATCCGTCTCAGGCTCCTTCTCTGGCCCAGCCTCTGGTGTTC
AGTAATTCGAAGCAGACTGCCATATCACAGCCTGCTTCAGG
GAACACATTTTCTCATCACAGTATGGTGAGCATGTTAGGGA
AAGGATTTGGTGATGTCGGTGAAGCTAAAGGCGGCAGTACT
ACAGGCTCCCAGTTCTTGGAGCAATTCAAGACTGCCCAAGC
CCTGGCTCAGTTGGCAGCTCAGCATTCTCAGTCTGGAAGCA
CCACCACCTCCTCTTGGGACATGGGCTCGACGACACAATCC
CCATCACTGGTGCAGTATGATTTGAAGAACCCAAGTGATTC
AGCAGTGCACAGCCCCTTTACAAAGCGCCAGGCTTTTACCC
CATCTTCAACCATGATGGAGGTGTTCCTTCAGGAGAAGTCA
CCTGCAGTGGCTACCTCCACAGCTGCACCTCCACCTCCGTC
TTCTCCTCTGCCAAGCAAATCCACATCGGCTCCACAGATGT
CGCCTGGATCTTCAGACAACCAGTCCTCTAGCCCTCAGCCG
GCTCAGCAGAAACTGAAACAGCAGAAGAAAAAAGCCTCCTT
GACTTCTAAGATTCCTGCTCTGGCTGTGGAGATGCCTGGCT
CAGCAGATATCTCAGGGCTAAACCTGCAGTTTGGGGCATTG
CAGTTTGGGTCAGAGCCTGTCCTTTCTGATTATGAGTCCAC
CCCCACCACGAGCGCCTCTTCAAGCCAGGCTCCAAGTAGCC
TGTATACCAGCACGGCCAGTGAATCATCCTCTACAATTTCA
TCTAACCAGAGTCAGGAGTCTGGTTATCAGAGCGGCCCAAT
TCAGTCGACAACCTATACCTCCCAAAATAATGCTCAGGGCC
CTCTTTATGAACAGAGATCCACACAGACTCGGCGGTACCCC
AGCTCCATCTCTTCATCACCCCAAAAGGACCTGACTCAGGC
AAAGAATGGCTTCAGTTCTGTGCAGGCCACGCAGTTACAGA
CCACACAATCTGTTGAAGGTGCTACAGGCTCTGCAGTGAAA
TCTGATTCACCTTCCACTTCTAGCATCCCCCCTCTCAATGA
AACGGTATCTGCAGCTTCCTTACTGACGACAACCAATCAGC
ATTCATCCTCCTTGGGTGGCTTGAGCCACAGTGAGGAGATT
CCAAATACTACCACCACACAACACAGCAGCACGTTATCTAC
GCAGCAGAATACCCTTTCATCATCAACATCTTCTGGGCGCA
CTTCGACATCCACTCTTTTGCACACAAGTGTGGAGAGTGAG
GCGAATCTCCATTCTTCCTCCAGCACTTTTTCCACCACATC
CAGCACAGTCTCTGCACCTCCCCCAGTGGTCAGTGTCTCCT
CCAGTCTCAATAGTGGCAGTAGCCTGGGCCTCAGCCTAGGC
AGCAACTCCACTGTCACAGCCTCGACTCGAAGCTCAGTTGC
TACGACTTCAGGAAAAGCTCCTCCCAACCTCCCTCCTGGGG
TCCCGCCGTTGTTGCCTAATCCGTATATTATGGCTCCAGGG
CTGTTACATGCCTACCCGCCACAAGTATATGGTTATGATGA
CTTGCAGATGCTTCAGACAAGATTTCCATTGGATTACTACA
GCATCCCATTTCCCACACCCACTACTCCGCTGACTGGGAGG
GATGGTAGCCTGGCCAGCAACCCTTATTCTGGTGACCTCAC
AAAGTTCGGCCGTGGGGATGCCTCCTCCCCAGCCCCGGCCA
CAACCTTGGCCCAACCCCAACAGAACCAGACGCAGACTCAC
CATACCACGCAGCAGACATTCCTGAACCCGGCGCTGCCTCC
TGGCTACAGTTACACCAGCCTGCCATACTATACAGGGGTCC
CGGGCCTCCCCAGCACCTTCCAGTATGGGCCTGCTGTGTTC
CCTGTGGCTCCTACCTCTTCCAAGCAGCATGGTGTGAATGT
CAGTGTGAATGCATCGGCCACCCCTTTCCAACAGCCGAGTG
GATATGGGTCTCATGGATACAACACTGGTGTTTCAGTCACC
TCCAGTAACACGGGCGTGCCAGATATCTCGGGTTCTGTGTA
CTCCAAAACCCAGTCCTTTGAGAAACAAGGTTTTCATTCCG
GTACTCCTGCTGCTTCCTTCAACTTGCCTTCAGCCCTAGGA
AGTGGGGGCCCCATCAATCCGGCCACAGCTGCTGCCTACCC
ACCTGCCCCCTTTATGCACATTCTGACCCCCCATCAGCAGC
CGCATTCTCAGATCCTTCACCATCACCTGCAGCAGGATGGC
CAGGACATCCTCAATTTCGTCGATGACCAGCTTGGTGAATA
AGTATTACTGTACCAACTGGGCCTCCTCTAGCAGGCCCCTG
AAGGCAGTGGAATAAAATGAAATCTTCGCCCTTTAAGAACT
CCTGACCTTAATGTGGTAGTAGTATCTTGTCCTTGAGGGGA
TTTCCTTCCCCTCACCCCTAAGACTTTCACAACCTGGTGAC
TGGAAAGAACCACCACAAATCTTCATTTCCTCCAGAAACTG
CTACATCTACAGCCGATTTCAGGCAGTAAAGGGAGAGGGAT
AGAGGAGATTGGGTGGAAAATGGAGAGGATCAAGAAGGAGC
TGAGACCATTTCAAAGAAAAAAAATGCTTTATAGAGTTTTA
AGTATGACTTAGATGGGTCCAGGCAAATAAACTAAAAAGAA
GTGAAGGCAACATGTATCGTCTGGCAGAACTAAATCTTGGA
GTGGGGTGAGGGATGAAAGACTACATATTGGGTACAGTGTA
CACTGCTCGGGTGATGGGTGCGCTAAAGTCGCAGAAATCAC
TAAAGAACTCATCCATGTAACCAAACACCACCTGTACCCCA
AAAACGAAATAAAAAAACAAAACCTTGGGGCCCATTCCCCC
TAGGAATGGACTACTGTAAAAA

[0168] In some embodiments, the UBAP2L protein has an amino acid sequence comprising, consisting of, or consisting essentially of all or part of a sequence selected from SEQ ID NO: 68, SEQ ID NO: 69, SEQ ID NO: 70, SEQ ID NO: 71 and a biological equivalent of each thereof.

(NP_0556623)
(SEQ ID NO: 68)
MMTSVGTNRARGNWEQPQNQNQTQHKQRPQATAEQIRLAQMISDHNDAD
FEEKVKQLIDITGKNQDECVIALHDCNGDVNRAINVLLEGNPDTHSWEM
VGKKKGVSGQKDGGQTESNEEGKENRDRDRDYSRRRGGPPRRGRGASRG
REFRGQENGLDGTKSGGPSGRGTERGRRGRGRGRGGSGRRGGRFSAQGM
GTFNPADYAEPANTDDNYGNSSGNTWNNTGHFEPDDGTSAWRTATEEWG
TEDWNEDLSETKIFTASNVSSVPLPAENVTITAGQRIDLAVLLGKTPST
MENDSSNLDPSQAPSLAQPLVFSNSKQTAISQPASGNTFSHHSMVSMLG
KGFGDVGEAKGGSTTGSQFLEQFKTAQALAQLAAQHSQSGSTTTSSWDM
GSTTQSPSLVQYDLKNPSDSAVHSPFTKRQAFTPSSTMMEVFLQEKSPA
VATSTAAPPPPSSPLPSKSTSAPQMSPGSSDNQSSSPQPAQQKLKQQKK
KASLTSKIPALAVEMPGSADISGLNLQFGALQFGSEPVLSDYESTPTTS
ASSSQAPSSLYTSTASESSSTISSNQSQESGYQSGPIQSTTYTSQNNAQ
GPLYEQRSTQTRRYPSSISSSPQKDLTQAKNGFSSVQATQLQTTQSVEG
ATGSAVKSDSPSTSSIPPLNETVSAASLLTTTNQHSSSLGGLSHSEEIP
NTTTTQHSSTLSTQQNTLSSSTSSGRTSTSTLLHTSVESEANLHSSSST
FSTTSSTVSAPPPVVSVSSSLNSGSSLGLSLGSNSTVTASTRSSVATTS
GKAPPNLPPGVPPLLPNPYIMAPGLLHAYPPQVYGYDDLQMLQTRFPLD
YYSIPFPTPTTPLTGRDGSLASNPYSGDLTKFGRGDASSPAPATTLAQP
QQNQTQTHHTTQQTFLNPALPPGYSYTSLPYYTGVPGLPSTFQYGPAVF
PVAPTSSKQHGVNVSVNASATPFQQPSGYGSHGYNTGVSVTSSNTGVPD
ISGSVYSKTQQSFEKQGFHSGTPAASFNLPSALGSGGPINPATAAAYPP
APFMHILTPHQQPHSQILHHHLQQDGQTGSGQRSQTSSIPQKPQTNKSA
YNSYSWGAN
(NP_001120792.1)
(SEQ ID NO: 69)
MMTSVGTNRARGNWEQPQNQNQTQHKQRPQATAEQIRLAQMISDHNDAD
FEEKVKQLIDITGKNQDECVIALHDCNGDVNRAINVLLEGNPDTHSWEM
VGKKKGVSGQKDGGQTESNEEGKENRDRDRDYSRRRGGPPRRGRGASRG
REFRGQENGLDGTKSGGPSGRGTERGRRGRGRGRGGSGRRGGRFSAQGM
GTFNPADYAEPANTDDNYGNSSGNTWNNTGHFEPDDGTSAWRTATEEWG
TEDWNEDLSETKIFTASNVSSVPLPAENVTITAGQRIDLAVLLGKTPST
MENDSSNLDPSQAPSLAQPLVFSNSKQTAISQPASGNTFSHHSMVSMLG
KGFGDVGEAKGGSTTGSQFLEQFKTAQALAQLAAQHSQSGSTTTSSWDM
GSTTQSPSLVQYDLKNPSDSAVHSPFTKRQAFTPSSTMMEVFLQEKSPA
VATSTAAPPPPSSPLPSKSTSAPQMSPGSSDNQSSSPQPAQQKLKQQKK
KASLTSKIPALAVEMPGSADISGLNLQFGALQFGSEPVLSDYESTPTTS
ASSSQAPSSLYTSTASESSSTISSNQSQESGYQSGPIQSTTYTSQNNAQ
GPLYEQRSTQTRRYPSSISSSPQKDLTQAKNGFSSVQATQLQTTQSVEG
ATGSAVKSDSPSTSSIPPLNETVSAASLLTTTNQHSSSLGGLSHSEEIP
NTTTTQHSSTLSTQQNTLSSSTSSGRTSTSTLLHTSVESEANLHSSSST
FSTTSSTVSAPPPVVSVSSSLNSGSSLGLSLGSNSTVTASTRSSVATTS
GKAPPNLPPGVPPLLPNPYIMAPGLLHAYPPQVYGYDDLQMLQTRFPLD
YYSIPFPTPTTPLTGRDGSLASNPYSGDLTKFGRGDASSPAPATTLAQP
QQNQTQTHHTTQQTFLNPALPPGYSYTSLPYYTGVPGLPSTFQYGPAVF
PVAPTSSKQHGVNVSVNASATPFQQPSGYGSHGYNTGRKYPPPYKHFWT
AES
(NP_001274744.1)
(SEQ ID NO: 70)
MMTSVGTNRARGNWEQPQNQNQTQHKQRPQATAEQIRLAQMISDHNDAD
FEEKVKQLIDITGKNQDECVIALHDCNGDVNRAINVLLEGNPDTHSWEM
VGKKKGVSGQKDGGQTESNEEGKENRDRDRDYSRRRGGPPRRGRVRGQE
NGLDGTKSGGPSGRGTERGRRGRGRGRGGSGRRGGRFSAQGMGTFNPAD
YAEPANTDDNYGNSSGNTWNNTGHFEPDDGTSAWRTATEEWGTEDWNED
LSETKIFTASNVSSVPLPAENVTITAGQRIDLAVLLGKTPSTMENDSSN
LDPSQAPSLAQPLVFSNSKQTAISQPASGNTFSHHSMVSMLGKGFGDVG
EAKGGSTTGSQFLEQFKTAQALAQLAAQHSQSGSTTTSSWDMGSTTQSP
SLVQYDLKNPSDSAVHSPFTKRQAFTPSSTMMEVFLQEKSPAVATSTAA
PPPPSSPLPSKSTSAPQMSPGSSDNQSSSPQPAQQKLKQQKKKASLTSK
IPALAVEMPGSADISGLNLQFGALQFGSEPVLSDYESTPTTSASSSQAP
SSLYTSTASESSSTISSNQSQESGYQSGPIQSTTYTSQNNAQGPLYEQR
STQTRRYPSSISSSPQKDLTQAKNGFSSVQATQLQTTQSVEGATGSAVK
SDSPSTSSIPPLNETVSAASLLTTTNQHSSSLGGLSHSEEIPNTTTTQH
SSTLSTQQNTLSSSTSSGRTSTSTLLHTSVESEANLHSSSSTFSTTSST
VSAPPPVVSVSSSLNSGSSLGLSLGSNSTVTASTRSSVATTSGKAPPNL
PPGVPPLLPNPYIMAPGLLHAYPPQVYGYDDLQMLQTRFPLDYYSIPFP
TPTTPLTGRDGSLASNPYSGDLTKFGRGDASSPAPATTLAQPQQNQTQT
HHTTQQTFLNPALPPGYSYTSLPYYTGVPGLPSTFQYGPAVFPVAPTSS
KQHGVNVSVNASATPFQQPSGYGSHGYNTGRKYPPPYKHFWTAES
(NP_001274745.1)
(SEQ ID NO: 71
MMTSVGTNRARGNWEQPQNQNQTQHKQRPQATAEQIRLAQMISDHNDAD
FEEKVKQLIDITGKNQDECVIALHDCNGDVNRAINVLLEGNPDTHSWEM
VGKKKGVSGQKDGGQTESNEEGKENRDRDRDYSRRRGGPPRRGRGASRG
RECMHGALSKPAVVRGQENGLDGTKSGGPSGRGTERGRRGRGRGRGGSG
RRGGRFSAQGMGTFNPADYAEPANTDDNYGNSSGNTWNNTGHFEPDDGT
SAWRTATEEWGTEDWNEDLSETKIFTASNVSSVPLPAENVTITAGQRID
LAVLLGKTPSTMENDSSNLDPSQAPSLAQPLVFSNSKQTAISQPASGNT
FSHHSMVSMLGKGFGDVGEAKGGSTTGSQFLEQFKTAQALAQLAAQHSQ
SGSTTTSSWDMGSTTQSPSLVQYDLKNPSDSAVHSPFTKRQAFTPSSTM
MEVFLQEKSPAVATSTAAPPPPSSPLPSKSTSAPQMSPGSSDNQSSSPQ
PAQQKLKQQKKKASLTSKIPALAVEMPGSADISGLNLQFGALQFGSEPV
LSDYESTPTTSASSSQAPSSLYTSTASESSSTISSNQSQESGYQSGPIQ
STTYTSQNNAQGPLYEQRSTQTRRYPSSISSSPQKDLTQAKNGFSSVQA
TQLQTTQSVEGATGSAVKSDSPSTSSIPPLNETVSAASLLTTTNQHSSS
LGGLSHSEEIPNTTTTQHSSTLSTQQNTLSSSTSSGRTSTSTLLHTSVE
SEANLHSSSSTFSTTSSTVSAPPPVVSVSSSLNSGSSLGLSLGSNSTVT
ASTRSSVATTSGKAPPNLPPGVPPLLPNPYIMAPGLLHAYPPQVYGYDD
LQMLQTRFPLDYYSIPFPTPTTPLTGRDGSLASNPYSGDLTKFGRGDAS
SPAPATTLAQPQQNQTQTHHTTQQTFLNPALPPGYSYTSLPYYTGVPGL
PSTFQYGPAVFPVAPTSSKQHGVNVSVNASATPFQQPSGYGSHGYNTGV
SVTSSNTGVPDISGSVYSKTQSFEKQGFHSGTPAASFNLPSALGSGGPI
NPATAAAYPPAPFMHILTPHQQPHSQILHHHLQQDGQDILNFVDDQLGE

[0169] In some embodiments, the fusion protein is a dCas9-UBAP2L fusion protein encoded by a nucleic acid comprising the following nucleic acid sequence:

(SEQ ID NO: 72)
ATGGGTAAGCCTATCCCTAACCCTCTCCTCGGTCTCGATTCTACGGCTAGCATGGACAAGAAGT
ACAGCATCGGCCTGGCCATCGGCACCAACTCTGTGGGCTGGGCCGTGATCACCGACGAGTACAA
GGTGCCCAGCAAGAAATTCAAGGTGCTGGGCAACACCGACCGGCACAGCATCAAGAAGAACCTG
ATCGGCGCCCTGCTGTTCGACAGCGGAGAAACAGCCGAGGCCACCCGGCTGAAGAGAACCGCCA
GAAGAAGATACACCAGACGGAAGAACCGGATCTGCTATCTGCAAGAGATCTTCAGCAACGAGAT
GGCCAAGGTGGACGACAGCTTCTTCCACAGACTGGAAGAGTCCTTCCTGGTGGAAGAGGATAAG
AAGCACGAGCGGCACCCCATCTTCGGCAACATCGTGGACGAGGTGGCCTACCACGAGAAGTACC
CCACCATCTACCACCTGAGAAAGAAACTGGTGGACAGCACCGACAAGGCCGACCTGCGGCTGAT
CTATCTGGCCCTGGCCCACATGATCAAGTTCCGGGGCCACTTCCTGATCGAGGGCGACCTGAAC
CCCGACAACAGCGACGTGGACAAGCTGTTCATCCAGCTGGTGCAGACCTACAACCAGCTGTTCG
AGGAAAACCCCATCAACGCCAGCGGCGTGGACGCCAAGGCCATCCTGTCTGCCAGACTGAGCAA
GAGCAGACGGCTGGAAAATCTGATCGCCCAGCTGCCCGGCGAGAAGAAGAATGGCCTGTTCGGC
AACCTGATTGCCCTGAGCCTGGGCCTGACCCCCAACTTCAAGAGCAACTTCGACCTGGCCGAGG
ATGCCAAACTGCAGCTGAGCAAGGACACCTACGACGACGACCTGGACAACCTGCTGGCCCAGAT
CGGCGACCAGTACGCCGACCTGTTTCTGGCCGCCAAGAACCTGTCCGACGCCATCCTGCTGAGC
GACATCCTGAGAGTGAACACCGAGATCACCAAGGCCCCCCTGAGCGCCTCTATGATCAAGAGAT
ACGACGAGCACCACCAGGACCTGACCCTGCTGAAAGCTCTCGTGCGGCAGCAGCTGCCTGAGAA
GTACAAAGAGATTTTCTTCGACCAGAGCAAGAACGGCTACGCCGGCTACATCGATGGCGGAGCC
AGCCAGGAAGAGTTCTACAAGTTCATCAAGCCCATCCTGGAAAAGATGGACGGCACCGAGGAAC
TGCTCGTGAAGCTGAACAGAGAGGACCTGCTGCGGAAGCAGCGGACCTTCGACAACGGCAGCAT
CCCCCACCAGATCCACCTGGGAGAGCTGCACGCCATTCTGCGGCGGCAGGAAGATTTTTACCCA
TTCCTGAAGGACAACCGGGAAAAGATCGAGAAGATCCTGACCTTCCGCATCCCCTACTACGTGG
GCCCTCTGGCCAGGGGAAACAGCAGATTCGCCTGGATGACCAGAAAGAGCGAGGAAACCATCAC
CCCCTGGAACTTCGAGGAAGTGGTGGACAAGGGCGCCAGCGCCCAGAGCTTCATCGAGCGGATG
ACCAACTTCGATAAGAACCTGCCCAACGAGAAGGTGCTGCCCAAGCACAGCCTGCTGTACGAGT
ACTTCACCGTGTACAACGAGCTGACCAAAGTGAAATACGTGACCGAGGGAATGAGAAAGCCCGC
CTTCCTGAGCGGCGAGCAGAAAAAAGCCATCGTGGACCTGCTGTTCAAGACCAACCGGAAAGTG
ACCGTGAAGCAGCTGAAAGAGGACTACTTCAAGAAAATCGAGTGCTTCGACTCCGTGGAAATCT
CCGGCGTGGAAGATCGGTTCAACGCCTCCCTGGGCACATACCACGATCTGCTGAAAATTATCAA
GGACAAGGACTTCCTGGACAATGAGGAAAACGAGGACATTCTGGAAGATATCGTGCTGACCCTG
ACACTGTTTGAGGACAGAGAGATGATCGAGGAACGGCTGAAAACCTATGCCCACCTGTTCGACG
ACAAAGTGATGAAGCAGCTGAAGCGGCGGAGATACACCGGCTGGGGCAGGCTGAGCCGGAAGCT
GATCAACGGCATCCGGGACAAGCAGTCCGGCAAGACAATCCTGGATTTCCTGAAGTCCGACGGC
TTCGCCAACAGAAACTTCATGCAGCTGATCCACGACGACAGCCTGACCTTTAAAGAGGACATCC
AGAAAGCCCAGGTGTCCGGCCAGGGCGATAGCCTGCACGAGCACATTGCCAATCTGGCCGGCAG
CCCCGCCATTAAGAAGGGCATCCTGCAGACAGTGAAGGTGGTGGACGAGCTCGTGAAAGTGATG
GGCCGGCACAAGCCCGAGAACATCGTGATCGAAATGGCCAGAGAGAACCAGACCACCCAGAAGG
GACAGAAGAACAGCCGCGAGAGAATGAAGCGGATCGAAGAGGGCATCAAAGAGCTGGGCAGCCA
GATCCTGAAAGAACACCCCGTGGAAAACACCCAGCTGCAGAACGAGAAGCTGTACCTGTACTAC
CTGCAGAATGGGCGGGATATGTACGTGGACCAGGAACTGGACATCAACCGGCTGTCCGACTACG
ATGTGGACGCTATCGTGCCTCAGAGCTTTCTGAAGGACGACTCCATCGATAACAAAGTGCTGAC
TCGGAGCGACAAGAACCGGGGCAAGAGCGACAACGTGCCCTCCGAAGAGGTCGTGAAGAAGATG
AAGAACTACTGGCGCCAGCTGCTGAATGCCAAGCTGATTACCCAGAGGAAGTTCGACAATCTGA
CCAAGGCCGAGAGAGGCGGCCTGAGCGAACTGGATAAGGCCGGCTTCATCAAGAGACAGCTGGT
GGAAACCCGGCAGATCACAAAGCACGTGGCACAGATCCTGGACTCCCGGATGAACACTAAGTAC
GACGAGAACGACAAACTGATCCGGGAAGTGAAAGTGATCACCCTGAAGTCCAAGCTGGTGTCCG
ATTTCCGGAAGGATTTCCAGTTTTACAAAGTGCGCGAGATCAACAACTACCACCACGCCCACGA
CGCCTACCTGAACGCCGTCGTGGGAACCGCCCTGATCAAAAAGTACCCTAAGCTGGAAAGCGAG
TTCGTGTACGGCGACTACAAGGTGTACGACGTGCGGAAGATGATCGCCAAGAGCGAGCAGGAAA
TCGGCAAGGCTACCGCCAAGTACTTCTTCTACAGCAACATCATGAACTTTTTCAAGACCGAGAT
TACCCTGGCCAACGGCGAGATCCGGAAGCGGCCTCTGATCGAGACAAACGGCGAAACAGGCGAG
ATCGTGTGGGATAAGGGCCGGGACTTTGCCACCGTGCGGAAAGTGCTGTCTATGCCCCAAGTGA
ATATCGTGAAAAAGACCGAGGTGCAGACAGGCGGCTTCAGCAAAGAGTCTATCCTGCCCAAGAG
GAACAGCGACAAGCTGATCGCCAGAAAGAAGGACTGGGACCCTAAGAAGTACGGCGGCTTCGAC
AGCCCCACCGTGGCCTATTCTGTGCTGGTGGTGGCCAAAGTGGAAAAGGGCAAGTCCAAGAAAC
TGAAGAGTGTGAAAGAGCTGCTGGGGATCACCATCATGGAAAGAAGCAGCTTCGAGAAGAATCC
CATCGACTTTCTGGAAGCCAAGGGCTACAAAGAAGTGAAAAAGGACCTGATCATCAAGCTGCCT
AAGTACTCCCTGTTCGAGCTGGAAAACGGCCGGAAGAGAATGCTGGCCTCTGCCGGCGAACTGC
AGAAGGGAAACGAACTGGCCCTGCCCTCCAAATATGTGAACTTCCTGTACCTGGCCAGCCACTA
TGAGAAGCTGAAGGGCTCCCCCGAGGATAATGAGCAGAAACAGCTGTTTGTGGAACAGCACAAA
CACTACCTGGACGAGATCATCGAGCAGATCAGCGAGTTCTCCAAGAGAGTGATCCTGGCCGACG
CTAATCTGGACAAGGTGCTGAGCGCCTACAACAAGCACAGAGACAAGCCTATCAGAGAGCAGGC
CGAGAATATCATCCACCTGTTTACCCTGACCAATCTGGGAGCCCCTGCCGCCTTCAAGTACTTT
GACACCACCATCGACCGGAAGAGGTACACCAGCACCAAAGAGGTGCTGGACGCCACCCTGATCC
ACCAGAGCATCACCGGCCTGTACGAGACACGGATCGACCTGTCTCAGCTGGGAGGCGACCTCGA
GGGCGGATCCGGTGGTTCCGGAGGAGCTGTCGACACATCGGTGGGCACTAACCGAGCCCGGGGA
AACTGGGAACAACCTCAAAACCAAAACCAGACACAGCACAAGCAGCGGCCACAGGCCACTGCAG
AACAAATTAGACTTGCACAGATGATTTCGGACCATAATGATGCTGACTTTGAGGAGAAGGTGAA
ACAATTGATTGATATTACAGGCAAGAACCAGGATGAATGTGTGATTGCTTTGCATGACTGCAAT
GGAGATGTCAACAGAGCTATCAATGTTCTTCTGGAAGGAAACCCAGACACGCATTCCTGGGAGA
TGGTCGGGAAGAAGAAGGGAGTCTCAGGCCAGAAGGATGGTGGCCAGACGGAATCCAATGAGGA
AGGCAAAGAAAATCGAGACCGGGACAGAGACTATAGTCGGCGACGTGGTGGGCCACCAAGACGG
GGGAGAGGTGCCAGCCGTGGACGAGAGTTTCGAGGTCAGGAAAATGGATTGGATGGCACCAAGA
GTGGAGGGCCTTCTGGAAGAGGAACAGAAAGAGGCAGAAGGGGCCGTGGCCGAGGCAGAGGTGG
CTCTGGTAGGCGAGGAGGAAGGTTTTCTGCTCAAGGAATGGGAACCTTTAACCCAGCTGATTAT
GCAGAGCCAGCCAATACTGATGATAACTATGGCAATAGCAGCGGCAATACGTGGAACAACACTG
GCCACTTTGAACCAGATGATGGGACGAGTGCATGGAGGACTGCAACAGAGGAGTGGGGGACTGA
AGATTGGAATGAAGATCTTTCTGAGACCAAGATCTTCACTGCCTCTAATGTGTCTTCAGTGCCT
CTGCCTGCGGAGAATGTGACAATCACTGCTGGTCAGAGAATTGACCTTGCTGTTCTGCTGGGGA
AGACACCATCTACAATGGAGAATGATTCATCTAATCTGGATCCGTCTCAGGCTCCTTCTCTGGC
CCAGCCTCTGGTGTTCAGTAATTCGAAGCAGACTGCCATATCACAGCCTGCTTCAGGGAACACA
TTTTCTCATCACAGTATGGTGAGCATGTTAGGGAAAGGATTTGGTGATGTCGGTGAAGCTAAAG
GCGGCAGTACTACAGGCTCCCAGTTCTTGGAGCAATTCAAGACTGCCCAAGCCCTGGCTCAGTT
GGCAGCTCAGCATTCTCAGTCTGGAAGCACCACCACCTCCTCTTGGGACATGGGCTCGACGACA
CAATCCCCATCACTGGTGCAGTATGATTTGAAGAACCCAAGTGATTCAGCAGTGCACAGCCCCT
TTACAAAGCGCCAGGCTTTTACCCCATCTTCAACCATGATGGAGGTGTTCCTTCAGGAGAAGTC
ACCTGCAGTGGCTACCTCCACAGCTGCACCTCCACCTCCGTCTTCTCCTCTGCCAAGCAAATCC
ACATCGGCTCCACAGATGTCGCCTGGATCTTCAGACAACCAGTCCTCTAGCCCTCAGCCGGCTC
AGCAGAAACTGAAACAGCAGAAGAAAAAAGCCTCCTTGACTTCTAAGATTCCTGCTCTGGCTGT
GGAGATGCCTGGCTCAGCAGATATCTCAGGGCTAAACCTGCAGTTTGGGGCATTGCAGTTTGGG
TCAGAGCCTGTCCTTTCTGATTATGAGTCCACCCCCACCACGAGCGCCTCTTCAAGCCAGGCTC
CAAGTAGCCTGTATACCAGCACGGCCAGTGAATCATCCTCTACAATTTCATCTAACCAGAGTCA
GGAGTCTGGTTATCAGAGCGGCCCAATTCAGTCGACAACCTATACCTCCCAAAATAATGCTCAG
GGCCCTCTTTATGAACAGAGATCCACACAGACTCGGCGGTACCCCAGCTCCATCTCTTCATCAC
CCCAAAAGGACCTGACTCAGGCAAAGAATGGCTTCAGTTCTGTGCAGGCCACGCAGTTACAGAC
CACACAATCTGTTGAAGGTGCTACAGGCTCTGCAGTGAAATCTGATTCACCTTCCACTTCTAGC
ATCCCCCCTCTCAATGAAACGGTATCTGCAGCTTCCTTACTGACGACAACCAATCAGCATTCAT
CCTCCTTGGGTGGCTTGAGCCACAGTGAGGAGATTCCAAATACTACCACCACACAACACAGCAG
CACGTTATCTACGCAGCAGAATACCCTTTCATCATCAACATCTTCTGGGCGCACTTCGACATCC
ACTCTTTTGCACACAAGTGTGGAGAGTGAGGCGAATCTCCATTCTTCCTCCAGCACTTTTTCCA
CCACATCCAGCACAGTCTCTGCACCTCCCCCAGTGGTCAGTGTCTCCTCCAGTCTCAATAGTGG
CAGTAGCCTGGGCCTCAGCCTAGGCAGCAACTCCACTGTCACAGCCTCGACTCGAAGCTCAGTT
GCTACGACTTCAGGAAAAGCTCCTCCCAACCTCCCTCCTGGGGTCCCGCCGTTGTTGCCTAATC
CGTATATTATGGCTCCAGGGCTGTTACATGCCTACCCGCCACAAGTATATGGTTATGATGACTT
GCAGATGCTTCAGACAAGATTTCCATTGGATTACTACAGCATCCCATTTCCCACACCCACTACT
CCGCTGACTGGGAGGGATGGTAGCCTGGCCAGCAACCCTTATTCTGGTGACCTCACAAAGTTCG
GCCGTGGGGATGCCTCCTCCCCAGCCCCGGCCACAACCTTGGCCCAACCCCAACAGAACCAGAC
GCAGACTCACCATACCACGCAGCAGACATTCCTGAACCCGGCGCTGCCTCCTGGCTACAGTTAC
ACCAGCCTGCCATACTATACAGGGGTCCCGGGCCTCCCCAGCACCTTCCAGTATGGGCCTGCTG
TGTTCCCTGTGGCTCCTACCTCTTCCAAGCAGCATGGTGTGAATGTCAGTGTGAATGCATCGGC
CACCCCTTTCCAACAGCCGAGTGGATATGGGTCTCATGGATACAACACTGGTGTTTCAGTCACC
TCCAGTAACACGGGCGTGCCAGATATCTCGGGTTCTGTGTACTCCAAAACCCAGCAGTCCTTTG
AGAAACAAGGTTTTCATTCCGGTACTCCTGCTGCTTCCTTCAACTTGCCTTCAGCCCTAGGAAG
TGGGGGCCCCATCAATCCGGCCACAGCTGCTGCCTACCCACCTGCCCCCTTTATGCACATTCTG
ACCCCCCATCAGCAGCCGCATTCTCAGATCCTTCACCATCACCTGCAGCAGGATGGCCAGACGG
GCAGCGGGCAACGTAGCCAGACCAGCTCCATCCCGCAGAAGCCCCAGACCAACAAGTCTGCCTA
CAACAGCTACAGCTGGGGGGCCAACTCTAGACTTAAG

### Polynucleotides and Vectors

[0170] In some aspects, provided herein are polynucleotides encoding a fusion protein comprising, consisting of, or consisting essentially of: (i) a guide nucleotide sequence-programmable RNA binding protein; and (ii) an EIF4E protein. In other aspects, provided herein are polynucleotides encoding a fusion protein comprising, consisting of, or consisting essentially of: (i) a guide nucleotide sequence-programmable RNA binding protein; and (ii) an EIF4E-BP1 protein. In some embodiments, the polynucleotides further comprise a nucleic acid sequence encoding a linker peptide.

[0171] In some aspects, provided herein are vectors comprising, consisting of, or consisting essentially of a polynucleotide encoding a fusion protein comprising, consisting of, or consisting essentially of: (i) a guide nucleotide sequence-programmable RNA binding protein; and (ii) an EIF4E protein. In some embodiments, the guide nucleotide sequence-programmable RNA binding protein and the EIF4E protein are encoded in a single vector. In other aspects, provided herein are vectors comprising, consisting of, or consisting essentially of a polynucleotide encoding a fusion protein comprising, consisting of, or consisting essentially of: (i) a guide nucleotide sequence-programmable RNA binding protein; and (ii) an EIF4E-BP1 protein. In some embodiments, the polynucleotides further comprise a nucleic acid sequence encoding a linker peptide. In some embodiments, the guide nucleotide sequence-programmable RNA binding protein and the EIF4-BP1 protein are encoded in a single vector.

[0172] In some aspects, provided herein are polynucleotides encoding a fusion RNA comprising, consisting of, or consisting essentially of: (i) a guide nucleotide sequence-programmable RNA; and (ii) one or more internal ribosome entry sites (IRES). In some embodiments, the polynucleotides further comprise a nucleic acid sequence encoding a spacer RNA.

[0173] In some aspects, provided herein are vectors comprising, consisting of, or consisting essentially of a polynucleotide encoding a fusion RNA comprising, consisting of, or consisting essentially of: (i) a guide nucleotide sequence-programmable RNA; and (ii) one or more internal ribosome entry sites (IRES), optionally wherein the vector is an adenoviral vector, an adeno-associated viral vector, or a lentiviral vector. In some embodiments, the vector further comprises an expression control element. In some embodiments, the vector further comprises a selectable marker. In some embodiments, the vector further comprises a polynucleotide encoding a tracrRNA and/or a PAMmer. In some embodiments, the guide nucleotide sequence-programmable RNA and one or more internal ribosome binding sites (IRES) are encoded in a single vector.

[0174] In some embodiments, the vector is a viral vector. In some embodiments, the vector is an adenoviral vector, an adeno-associated viral (AAV) vector, or a lentiviral vector. In some embodiments, the vector is a retroviral vector, an adenoviral/retroviral chimera vector, a herpes simplex viral I or II vector, a parvoviral vector, a reticuloendotheliosis viral vector, a polioviral vector, a papillomaviral vector, a vaccinia viral vector, or any hybrid or chimeric vector incorporating favorable aspects of two or more viral vectors. In some embodiments, the vector further comprises one or more expression control elements operably linked to the polynucleotide. In some embodiments, the vector further comprises one or more selectable markers. In some embodiments, the AAV vector has low toxicity. In some embodiments, the AAV vector does not incorporate into the host genome, thereby having a low probability of causing insertional mutagenesis. In some embodiments, the AAV vector can encode a range total polynucleotides from 4.5 kb to 4.75 kb. In some embodiments, exemplary AAV vectors that may be used in any of the herein described compositions, systems, methods, and kits can include an AAV1 vector, a modified AAV1 vector, an AAV2 vector, a modified AAV2 vector, an AAV3 vector, a modified AAV3 vector, an AAV4 vector, a modified AAV4 vector, an AAV5 vector, a modified AAV5 vector, an AAV6 vector, a modified AAV6 vector, an AAV7 vector, a modified AAV7 vector, an AAV8 vector, an AAV9 vector, an AAV.rh10 vector, a modified AAV.rh10 vector, an AAV.rh32/33 vector, a modified AAV.rh32/33 vector, an AAV.rh43 vector, a modified AAV.rh43 vector, an AAV.rh64R1 vector, and a modified AAV.rh64R1 vector and any combinations or equivalents thereof. In some embodiments, the lentiviral vector is an integrase-competent lentiviral vector (ICLV). In some embodiments, the lentiviral vector can refer to the transgene plasmid vector as well as the transgene plasmid vector in conjunction with related plasmids (e.g., a packaging plasmid, a rev expressing plasmid, an envelope plasmid) as well as a lentiviral-based particle capable of introducing exogenous nucleic acid into a cell through a viral or viral-like entry mechanism. Lentiviral vectors are well-known in the art (see, e.g., Trono D. (2002) Lentiviral vectors, New York: Spring-Verlag Berlin Heidelberg and Durand et al. (2011) Viruses 3(2):132-159 doi: 10.3390/v3020132). In some embodiments, exemplary lentiviral vectors that may be used in any of the herein described compositions, systems, methods, and kits can include a human immunodeficiency virus (HIV) 1 vector, a modified human immunodeficiency virus (HIV) 1 vector, a human immunodeficiency virus (HIV) 2 vector, a modified human immunodeficiency virus (HIV) 2 vector, a sooty mangabey simian immunodeficiency virus (SIV_{SM}) vector, a modified sooty mangabey simian immunodeficiency virus (SIV_{SM}) vector, a African green monkey simian immunodeficiency virus (SIV_{AGM}) vector, a modified African green monkey simian immunodeficiency virus (SIV_{AGM}) vector, an equine infectious anemia virus (EIAV) vector, a modified equine infectious anemia virus (EIAV) vector, a feline immunodeficiency virus (FIV) vector, a modified feline immunodeficiency virus (FIV) vector, a Visna/maedi virus (VNV/VMV) vector, a modified Visna/maedi virus (VNV/VMV) vector, a caprine arthritis-encephalitis virus (CAEV) vector, a modified caprine arthritis-encephalitis virus (CAEV) vector, a bovine immunodeficiency virus (BIV), or a modified bovine immunodeficiency virus (BIV).

[0175] In some embodiments, the vector further comprises, consists of, or consists essentially of a polynucleotide encoding either (i) a gRNA, or (ii) a crRNA and a tracrRNA. In some embodiments, the gRNA or the crRNA comprises a nucleotide sequence complementary to a target RNA. In some embodiments, the guide nucleotide sequence-programmable RNA binding protein and the EIF4E protein are encoded in a single vector further comprising, consisting of, or consisting essentially of a polynucleotide encoding either (i) a gRNA, or (ii) a crRNA and a tracrRNA. In some embodiments, the guide nucleotide sequence-programmable RNA binding protein and the EIF4E-BP1 protein are encoded in a single vector further comprising, consisting of, or consisting essentially of a polynucleotide encoding either (i) a gRNA, or (ii) a crRNA and a tracrRNA

[0176] In some embodiments, the vector further comprises, consists of, or consists essentially of a polynucleotide encoding (i) a tracrRNA and/or (ii) a PAMmer oligonucleotide. In some embodiments, the fusion RNA comprises a nucleotide sequence complementary to a target RNA. In some embodiments, the guide nucleotide sequence-programmable RNA and one or more internal ribosome binding sites (IRES) are encoded in a single vector further comprising, consisting of, or consisting essentially of a polynucleotide encoding (i) a tracrRNA and/or (ii) a PAMmer oligonucleotide.

[0177] In some embodiments of the compositions and methods of the disclosure, a vector comprises a guide RNA of the disclosure. In some embodiments, the vector comprises at least one guide RNA of the disclosure. In some embodiments, the vector comprises one or more guide RNA(s) of the disclosure. In some embodiments, the vector comprises two or more guide RNAs of the disclosure. In some embodiments, the vector further comprises a fusion protein of the disclosure. In some embodiments, the fusion protein comprises a first RNA binding protein and a second RNA binding protein.

[0178] In some embodiments of the compositions and methods of the disclosure, a first vector comprises a guide RNA of the disclosure and a second vector comprises a fusion protein of the disclosure. In some embodiments, the first vector comprises at least one guide RNA of the disclosure. In some embodiments, the first vector comprises one or more guide RNA(s) of the disclosure. In some embodiments, the first vector comprises two or more guide RNA(s) of the disclosure. In some embodiments, the fusion protein comprises a first RNA binding protein and a second RNA binding protein. In some embodiments, the first vector and the second vector are identical. In some embodiments, the first vector and the second vector are not identical.

[0179] In some embodiments of the compositions and methods of the disclosure, a vector of the disclosure is a viral vector. In some embodiments, the viral vector comprises a sequence isolated or derived from a retrovirus. In some embodiments, the viral vector comprises a sequence isolated or derived from a lentivirus. In some embodiments, the viral vector comprises a sequence isolated or derived from an adenovirus. In some embodiments, the viral vector comprises a sequence isolated or derived from an adeno-associated virus (AAV). In some embodiments, the viral vector is replication incompetent. In some embodiments, the viral vector is isolated or recombinant. In some embodiments, the viral vector is self-complementary.

[0180] In some embodiments of the compositions and methods of the disclosure, the viral vector comprises a sequence isolated or derived from an adeno-associated virus (AAV). In some embodiments, the viral vector comprises an inverted terminal repeat sequence or a capsid sequence that is isolated or derived from an AAV of serotype AAV1, AAV2, AAV3, AAV4, AAV5, AAV6, AAV7, AAV8, AAV9, AAV10, AAV11, or AAV12, or the vector and/or components are derived from a synthetic AAV serotype, such as, without limitation, Anc80 AAV (an ancestor of AAV 1, 2, 6, 8 and 9). In some embodiments, the viral vector is replication incompetent. In some embodiments, the viral vector is isolated or recombinant (rAAV). In some embodiments, the viral vector is self-complementary (scAAV).

[0181] In some embodiments of the compositions and methods of the disclosure, a vector of the disclosure is a non-viral vector. In some embodiments, the vector comprises or consists of a nanoparticle, a micelle, a liposome or lipoplex, a polymersome, a polyplex, or a dendrimer.

### Cells

[0182] In other aspects, provided herein are cells comprising, consisting of, or consisting essentially of one or more vectors comprising, consisting of, or consisting essentially of a polynucleotide encoding a fusion protein comprising, consisting of, or consisting essentially of: (i) a guide nucleotide sequence-programmable RNA binding protein; and (ii) an EIF4E protein. In other aspects, provided herein are cells comprising, consisting of, or consisting essentially of a vector comprising, consisting of, or consisting essentially of a polynucleotide encoding a fusion protein comprising, consisting of, or consisting essentially of: (i) a guide nucleotide sequence-programmable RNA binding protein; and (ii) an EIF4E-BP1 protein. In some embodiments, the polynucleotides further comprise a nucleic acid sequence encoding a linker peptide.

[0183] In some aspects, provided herein are cells comprising, consisting of, or consisting essentially of a fusion protein comprising, consisting of, or consisting essentially of: (i) a guide nucleotide sequence-programmable RNA binding protein; and (ii) an EIF4E protein. In other aspects, provided herein are cells comprising, consisting of, or consisting essentially of a fusion protein comprising, consisting of, or consisting essentially of: (i) a guide nucleotide sequence-programmable RNA binding protein; and (ii) an EIF4E-BP1 protein.

[0184] In some aspects, provided herein are cells comprising, consisting of, or consisting essentially of a fusion RNA, a polynucleotide encoding the fusion RNA, a vector comprising the polynucleotide, or a viral particle comprising the fusion RNA, polynucleotide, or vector; wherein the fusion RNA comprises, consists of, or consists essentially of: (i) a guide nucleotide sequence-programmable RNA; and (ii) one or more internal ribosome entry sites (IRES). In some embodiments, the guide nucleotide sequence-programmable RNA is a guide RNA (gRNA) or a crisprRNA (crRNA). In some embodiments, the cell is a eukaryotic cell. In some embodiments, the cell is a prokaryotic cell. In some embodiments, the cell is a mammalian cell, optionally a bovine, murine, feline, equine, porcine, canine, simian, or human cell.

[0185] In some aspects, provided herein is a population of cells comprising, consisting of, or consisting essentially of a fusion RNA, a polynucleotide encoding the fusion RNA, a vector comprising the polynucleotide, or a viral particle comprising the fusion RNA, polynucleotide, or vector; wherein the fusion RNA comprises, consists of, or consists essentially of: (i) a guide nucleotide sequence-programmable RNA; and (ii) one or more internal ribosome entry sites (IRES). In some embodiments, the guide nucleotide sequence-programmable RNA is a guide RNA (gRNA) or a crisprRNA (crRNA). In some embodiments, the cell is a eukaryotic cell. In some embodiments, the cell is a prokaryotic cell. In some embodiments, the cell is a mammalian cell, optionally a bovine, murine, feline, equine, porcine, canine, simian, or human cell.

[0186] In some embodiments, the cell is a eukaryotic cell. In other embodiments, the cell is a prokaryotic cell. In some embodiments, the cell is a mammalian cell. In some embodiments, the cell is a bovine, murine, feline, equine, porcine, canine, simian, or human cell. In particular embodiments, the cell is a human cell. In some embodiments, the cell is isolated from a subject.

[0187] In some embodiments, a cell of the disclosure is a somatic cell. In some embodiments, a cell of the disclosure is a germline cell. In some embodiments, a germline cell of the disclosure is not a human cell.

[0188] In some embodiments of the compositions and methods of the disclosure, a cell of the disclosure is a stem cell. In some embodiments, a cell of the disclosure is an embryonic stem cell. In some embodiments, an embryonic stem cell of the disclosure is not a human cell. In some embodiments, a cell of the disclosure is a multipotent stem cell or a pluripotent stem cell. In some embodiments, a cell of the disclosure is an adult stem cell. In some embodiments, a cell of the disclosure is an induced pluripotent stem cell (iPSC). In some embodiments, a cell of the disclosure is a hematopoietic stem cell (HSC).

[0189] In some embodiments of the compositions and methods of the disclosure, a somatic cell of the disclosure is an immune cell. In some embodiments, an immune cell of the disclosure is a lymphocyte. In some embodiments, an immune cell of the disclosure is a T lymphocyte (also referred to herein as a T-cell). Exemplary T-cells of the disclosure include, but are not limited to, naive T cells, effector T cells, helper T cells, memory T cells, regulatory T cells (Tregs), and Gamma delta T cells. In some embodiments, an immune cell of the disclosure is a B lymphocyte. In some embodiments, an immune cell of the disclosure is a natural killer cell. In some embodiments, an immune cell of the disclosure is an antigen-presenting cell.

[0190] In some embodiments of the compositions and methods of the disclosure, a somatic cell of the disclosure is a muscle cell. In some embodiments, a muscle cell of the disclosure is a myoblast or a myocyte. In some embodiments, a muscle cell of the disclosure is a cardiac muscle cell, skeletal muscle cell or smooth muscle cell. In some embodiments, a muscle cell of the disclosure is a striated cell.

[0191] In some embodiments of the compositions and methods of the disclosure, a somatic cell of the disclosure is an epithelial cell. In some embodiments, an epithelial cell of the disclosure forms a squamous cell epithelium, a cuboidal cell epithelium, a columnar cell epithelium, a stratified cell epithelium, a pseudostratified columnar cell epithelium or a transitional cell epithelium. In some embodiments, an epithelial cell of the disclosure forms a gland including, but not limited to, a pineal gland, a thymus gland, a pituitary gland, a thyroid gland, an adrenal gland, an apocrine gland, a holocrine gland, a merocrine gland, a serous gland, a mucous gland, and a sebaceous gland. In some embodiments, an epithelial cell of the disclosure contacts an outer surface of an organ including, but not limited to, a lung, a spleen, a stomach, a pancreas, a bladder, an intestine, a kidney, a gallbladder, a liver, a larynx or a pharynx. In some embodiments, an epithelial cell of the disclosure contacts an outer surface of a blood vessel or a vein.

[0192] In some embodiments of the compositions and methods of the disclosure, a somatic cell of the disclosure is a neuronal cell. In some embodiments, a neuron cell of the disclosure is a neuron of the central nervous system. In some embodiments, a neuron cell of the disclosure is a neuron of the brain or the spinal cord. In some embodiments, a neuron cell of the disclosure is a neuron of the retina. In some embodiments, a neuron cell of the disclosure is a neuron of a cranial nerve or an optic nerve. In some embodiments, a neuron cell of the disclosure is a neuron of the peripheral nervous system. In some embodiments, a neuron cell of the disclosure is a neuroglial or a glial cell. In some embodiments, a glial of the disclosure is a glial cell of the central nervous system including, but not limited to, oligodendrocytes, astrocytes, ependymal cells, and microglia. In some embodiments, a glial of the disclosure is a glial cell of the peripheral nervous system including, but not limited to, Schwann cells and satellite cells.

[0193] In some embodiments of the compositions and methods of the disclosure, a somatic cell of the disclosure is a primary cell.

[0194] In some embodiments of the compositions and methods of the disclosure, a somatic cell of the disclosure is a cultured cell.

[0195] In some embodiments of the compositions and methods of the disclosure, a somatic cell of the disclosure is in vivo, in vitro, ex vivo, or in situ.

[0196] In some embodiments of the compositions and methods of the disclosure, a somatic cell of the disclosure is autologous or allogeneic.

### RNA-Targeted CRISPR Systems

[0197] In some aspects, provided herein are systems for post-transcriptional gene regulation, the systems comprising, consisting of, or consisting essentially of: (i) fusion protein comprising, consisting of, or consisting essentially of: (a) a guide nucleotide sequence-programmable RNA binding protein; and (b) an EIF4E protein; and either (ii) a gRNA or (iii) a crRNA and a tracrRNA, wherein the gRNA or the crRNA comprises a sequence complementary to a target mRNA. In some embodiments, the complementary sequence is a spacer sequence.

[0198] In other aspects, provided herein are systems for post-transcriptional gene regulation, the systems comprising, consisting of, or consisting essentially of: (i) fusion protein comprising, consisting of, or consisting essentially of: (a) a guide nucleotide sequence-programmable RNA binding protein; and (b) an EIF4E-BP1 protein; and either (ii) a gRNA or (iii) a crRNA and a tracrRNA, wherein the gRNA or the crRNA comprises a sequence complementary to a target mRNA. In some embodiments, the complementary sequence is a spacer sequence. In some embodiments, the fusion protein disclosed herein is used with the fusion RNA disclosed herein.

[0199] In some aspects, provided herein are systems for upregulating or increasing translation of a target mRNA, the systems comprising, consisting of, or consisting essentially of: (i) fusion protein comprising, consisting of, or consisting essentially of: (a) a guide nucleotide sequence-programmable RNA binding protein; and (b) an EIF4E protein; and either (ii) a gRNA or (iii) a crRNA and a tracrRNA, wherein the gRNA or the crRNA comprises a sequence complementary to a target mRNA. In some embodiments, the complementary sequence is a spacer sequence.

[0200] In some aspects, provided herein are systems for post-transcriptional gene regulation, the systems comprising, consisting of, or consisting essentially of: (a) a fusion RNA comprising, consisting of, or consisting essentially of: (i) a guide nucleotide sequence-programmable RNA; and (ii) one or more internal ribosome entry sites (IRES); and (b) a guide nucleotide sequence-programmable RNA binding protein, wherein the fusion RNA comprises a sequence complementary to a target mRNA. In some embodiments, the system further comprises a PAMmer. In some embodiments, the target mRNA does not comprise a PAM sequence or its complement.

[0201] In some aspects, provided herein are systems for increasing translation of a target mRNA, the systems comprising, consisting of, or consisting essentially of: (a) a fusion RNA comprising, consisting of, or consisting essentially of: (i) a guide nucleotide sequence-programmable RNA; and (ii) one or more internal ribosome entry sites (IRES); and (b) a guide nucleotide sequence-programmable RNA binding protein, wherein the fusion RNA comprises a sequence complementary to a target mRNA. In some embodiments, the system further comprises a PAMmer. In some embodiments, the target mRNA does not comprise a PAM sequence or its complement.

[0202] In some embodiments of the system, the guide nucleotide-sequence programmable RNA binding protein is selected from: Cas9, modified Cas9, Cpf1, Cas13a, Cas13b, CasRX/Cas13d, CasM and a biological equivalent of each thereof. In some embodiments, the guide nucleotide sequence-programmable RNA binding protein is selected from: Steptococcus pyogenes Cas9 (spCas9), Staphylococcus aureus Cas9 (saCas9), Francisella novicida Cas9 (FnCas9), Neisseria meningitidis Cas9 (nmCas9), Streptococcus thermophilus 1 Cas9 (St1Cas9), Streptococcus thermophilus 3 Cas9 (St3Cas9), and Brevibacillus laterosporus Cas9 (BlatCas9). In some embodiments, the guide nucleotide sequence-programmable RNA binding protein is nuclease inactive.

[0203] In some embodiments, the CasRX/Cas13d protein is an effector of the type VI-D CRISPR-Cas systems. In some embodiments, the CasRX/Case13d protein is an RNA-guided RNA endonuclease enzyme that can cut or bind RNA. In some embodiments, the CasRX/Cas13d protein can include one or more higher eukaryotes and prokaryotes nucleotide-binding (HEPN) domains. In some embodiments, the CasRX/Case13d protein can include either a wild-type or mutated HEPN domain. In some embodiments, the CasRX/Case13d protein includes a mutated HEPN domain that cannot cut RNA but can process guide RNA. In some embodiments, the CasRX/Cas13d protein does not require a protospacer flanking sequence. Also see WO Publication No. WO2019/040664 & US2019/0062724, which is incorporated herein by reference in its entirety, for further examples and sequences of CasRX/Cas13d protein, without limitation, specific reference is made to SEQ ID NOS: 54, 57, 61, 67, 69, 71, 72, 73, 74, 75, 76, 77, 78, 85, 86, 87, 88, 113, 147, 153, 154, 155, 158, 160, 162, 164, 170, 179, 183, 185, 187, 189, 190, 202, 204, 206, 208, 209, 210, and 212 reproduced herein. Yan et al. (2018) Mol Cell. 70(2):327-339 (doi: 10.1016/j.molce1.2018.02.2018) and Konermann et al. (2018) Cell 173(3):665-676 (doi: 10.1016/j.ce11/2018.02.033) have described CasRX/Cas13d proteins and both of which are incorporated by reference herein in their entireties. Also see WO Publication Nos. WO2018/183703 (CasM) and WO2019/006471 (Cas13d), which are incorporated herein by reference in their entirety.

[0204] In some embodiments, increasing or upregulating translation refers to an increase in the amount of peptide translated from the target mRNA as compared to a control. In some embodiments, the control comprises a level of peptide translated from the target mRNA in the absence of the fusion protein. In some embodiments, the control comprises the level of the peptide translated from the target mRNA prior to addition of the fusion protein. In some embodiments, translation is increased about 1.1 fold, about 1.2 fold, about 1.3 fold, about 1.4 fold, about 1.5 fold, about 1.6 fold, about 1.7 fold, about 1.8 fold, about 1.9 fold, about 2 fold, about 2.5 fold, about 3 fold, about 4 fold, about 5 fold, about 6 fold, about 7 fold, about 8 fold, about 9 fold, about 10 fold, about 20 fold, about 50 fold, about 100 fold, about 1000 fold, or about 10,000 fold relative to the control.

[0205] In other aspects, provided herein are systems for decreasing or downregulating translation of a target mRNA, the systems comprising, consisting of, or consisting essentially of: (i) fusion protein comprising, consisting of, or consisting essentially of: (a) a guide nucleotide sequence-programmable RNA binding protein; and (b) an EIF4E-BP1 protein; and either (ii) a gRNA or (iii) a crRNA and a tracrRNA, wherein the gRNA or the crRNA comprises a sequence complementary to a target mRNA. In some embodiments, the complementary sequence is a spacer sequence.

[0206] In some embodiments, decreasing or downregulating translation refers to a decrease in the amount of peptide translated from the target mRNA as compared to a control. In some embodiments, the control comprises a level of peptide translated from the target mRNA in the absence of the fusion protein. In some embodiments, the control comprises the level of the peptide translated from the target mRNA prior to addition of the fusion protein. In some embodiments, translation is decreased about 1.1 fold, about 1.2 fold, about 1.3 fold, about 1.4 fold, about 1.5 fold, about 1.6 fold, about 1.7 fold, about 1.8 fold, about 1.9 fold, about 2 fold, about 2.5 fold, about 3 fold, about 4 fold, about 5 fold, about 6 fold, about 7 fold, about 8 fold, about 9 fold, about 10 fold, about 20 fold, about 50 fold, about 100 fold, about 1000 fold, or about 10,000 fold relative to the control.

[0207] The amount of peptide translated can be determined by any method known in the art. Non-limiting examples of suitable methods of detection include Western blots, ELISAs, mass spectrometry, immunohistochemistry, immunofluorescence, and use of a reporter gene such as a fluorescence reporter gene.

[0208] In some embodiments of the systems described herein, the target mRNA comprises a PAM sequence. In other embodiments, the target mRNA does not comprise a PAM sequence. In some embodiments, the system comprises a PAMmer oligonucleotide. In other embodiments, the system does not comprise a PAMmer oligonucleotide.

### Methods

[0209] In some aspects, provided herein are methods for post-transcriptionally increasing or upregulating gene expression, the methods comprising, consisting of, or consisting essentially of contacting a target mRNA with a fusion protein comprising, consisting of, or consisting essentially of: (a) a guide nucleotide sequence-programmable RNA binding protein; and (b) an EIF4E protein, wherein the guide nucleotide sequence-programmable RNA binding protein binds a gRNA or a crRNA that hybridizes to a region of the target RNA.

[0210] In some embodiments, increasing or upregulating gene expression refers to an increase in the amount of peptide translated from the target mRNA as compared to a control. In some embodiments, the control comprises a level of peptide translated from the target mRNA in the absence of the fusion protein. In some embodiments, the control comprises the level of the peptide translated from the target mRNA prior to addition of the fusion protein. In some embodiments, translation is increased about 1.1 fold, about 1.2 fold, about 1.3 fold, about 1.4 fold, about 1.5 fold, about 1.6 fold, about 1.7 fold, about 1.8 fold, about 1.9 fold, about 2 fold, about 2.5 fold, about 3 fold, about 4 fold, about 5 fold, about 6 fold, about 7 fold, about 8 fold, about 9 fold, about 10 fold, about 20 fold, about 50 fold, about 100 fold, about 1000 fold, or about 10,000 fold relative to the control.

[0211] In some aspects, provided herein are methods for post-transcriptionally decreasing or downregulating gene expression, the methods comprising, consisting of, or consisting essentially of contacting a target mRNA with a fusion protein comprising, consisting of, or consisting essentially of: (a) a guide nucleotide sequence-programmable RNA binding protein; and (b) an EIF4E-BP1 protein, wherein the guide nucleotide sequence-programmable RNA binding protein binds a gRNA or a crRNA that hybridizes to a region of the target RNA.

[0212] In some embodiments, decreasing or downregulating gene expression refers to a decrease in the amount of peptide translated from the target mRNA as compared to a control. In some embodiments, the control comprises a level of peptide translated from the target mRNA in the absence of the fusion protein. In some embodiments, the control comprises the level of the peptide translated from the target mRNA prior to addition of the fusion protein. In some embodiments, translation is decreased about 1.1 fold, about 1.2 fold, about 1.3 fold, about 1.4 fold, about 1.5 fold, about 1.6 fold, about 1.7 fold, about 1.8 fold, about 1.9 fold, about 2 fold, about 2.5 fold, about 3 fold, about 4 fold, about 5 fold, about 6 fold, about 7 fold, about 8 fold, about 9 fold, about 10 fold, about 20 fold, about 50 fold, about 100 fold, about 1000 fold, or about 10,000 fold relative to the control.

[0213] The amount of peptide translated can be determined by any method known in the art. Non-limiting examples of suitable methods of detection include Western blots, ELISAs, mass spectrometry, immunohistochemistry, immunofluorescence, and use of a reporter gene such as a fluorescence reporter gene.

[0214] In some embodiments of the methods described herein, the target mRNA comprises a PAM sequence. In other embodiments, the target mRNA does not comprise a PAM sequence. In some embodiments, the method further comprises providing a PAMmer oligonucleotide. In other embodiments, the method does not comprise providing a PAMmer oligonucleotide.

[0215] In some embodiments, the target mRNA is in a cell. In some embodiments, the cell is a eukaryotic cell. In some embodiments, the cell is a prokaryotic cell. In some embodiments, the cell is a mammalian cell. In some embodiments, the cell is a bovine, murine, feline, equine, porcine, canine, simian, or human cell. In some embodiments, the cell is a plant cell. In some embodiments, the cell is in a subject. In some embodiments, the cell is in vivo, in vitro, ex vivo, or in situ. In some embodiments, the composition comprises a vector comprising composition comprising a guide RNA of the disclosure and a fusion protein of the disclosure. In some embodiments, the vector is an AAV.

[0216] In some aspects, the disclosure provides a method of treating a disease or disorder comprising administering to a subject a therapeutically effective amount of a composition of the disclosure. Also provided herein are methods for treating a disease or condition in a subject in need thereof, the methods comprising, consisting of, or consisting essentially of administering a fusion protein comprising, consisting of, or consisting essentially of: (a) a guide nucleotide sequence-programmable RNA binding protein; and (b) an EIF4E-BP1 protein, a polynucleotide encoding the fusion protein, a vector comprising the polynucleotide encoding the fusion protein, or viral particle comprising the vector to the subject, thereby decreasing or downregulating translation of a target mRNA in the subject. In some embodiments, the target mRNA is involved in the etiology of a disease or condition in the subject.

[0217] In some aspects, also provided herein are methods for treating a disease or condition in a subject in need thereof, the methods comprising, consisting of, or consisting essentially of administering a fusion protein comprising, consisting of, or consisting essentially of: (a) a guide nucleotide sequence-programmable RNA binding protein; and (b) an EIF4E protein, a polynucleotide encoding the fusion protein, a vector comprising the polynucleotide encoding the fusion protein, or viral particle comprising the vector to the subject, thereby increasing or upregulating translation of a target mRNA in the subject. In some embodiments, a deficiency in the target mRNA is related to the etiology of a disease or condition in the subject.

[0218] In some embodiments of the methods described herein, the subject is a plant or an animal. In some embodiments, the subject is a mammal. In some embodiments, the mammal is a bovine, equine, porcine, canine, feline, simian, murine, or human. In some embodiments, the subject is a human.

[0219] In some embodiments of the methods described herein, the subject is further administered (i) a gRNA complementary to the target mRNA, or (ii) a crRNA complementary to the target mRNA and a tracrRNA. In some embodiments, the complementary sequence is a spacer sequence.

[0220] In some embodiments of the compositions and methods of the disclosure, a disease or disorder of the disclosure includes, but is not limited to, a genetic disease or disorder. In some embodiments, the genetic disease or disorder is a single-gene disease or disorder. In some embodiments, the single-gene disease or disorder is an autosomal dominant disease or disorder, an autosomal recessive disease or disorder, an X-chromosome linked (X-linked) disease or disorder, an X-linked dominant disease or disorder, an X-linked recessive disease or disorder, a Y-linked disease or disorder or a mitochondrial disease or disorder. In some embodiments, the genetic disease or disorder is a multiple-gene disease or disorder. In some embodiments, the genetic disease or disorder is a multiple-gene disease or disorder. In some embodiments, the single-gene disease or disorder is an autosomal dominant disease or disorder including, but not limited to, Huntington's disease, neurofibromatosis type 1, neurofibromatosis type 2, Marfan syndrome, hereditary nonpolyposis colorectal cancer, hereditary multiple exostoses, Von Willebrand disease, and acute intermittent porphyria. In some embodiments, the single-gene disease or disorder is an autosomal recessive disease or disorder including, but not limited to, Albinism, Medium-chain acyl-CoA dehydrogenase deficiency, cystic fibrosis, sickle-cell disease, Tay-Sachs disease, Niemann-Pick disease, spinal muscular atrophy, and Roberts syndrome. In some embodiments, the single-gene disease or disorder is X-linked disease or disorder including, but not limited to, muscular dystrophy, Duchenne muscular dystrophy, Hemophilia, Adrenoleukodystrophy (ALD), Rett syndrome, and Hemophilia A. In some embodiments, the single-gene disease or disorder is a mitochondrial disorder including, but not limited to, Leber's hereditary optic neuropathy.

[0221] In some embodiments of the compositions and methods of the disclosure, a disease or disorder of the disclosure includes, but is not limited to, an immune disease or disorder. In some embodiments, the immune disease or disorder is an immunodeficiency disease or disorder including, but not limited to, B-cell deficiency, T-cell deficiency, neutropenia, asplenia, complement deficiency, acquired immunodeficiency syndrome (AIDS) and immunodeficiency due to medical intervention (immunosuppression as an intended or adverse effect of a medical therapy). In some embodiments, the immune disease or disorder is an autoimmune disease or disorder including, but not limited to, Achalasia, Addison's disease, Adult Still's disease, Agammaglobulinemia, Alopecia areata, Amyloidosis, Anti-GBM/Anti-TBM nephritis, Antiphospholipid syndrome, Autoimmune angioedema, Autoimmune dysautonomia, Autoimmune encephalomyelitis, Autoimmune hepatitis, Autoimmune inner ear disease (AIED), Autoimmune myocarditis, Autoimmune oophoritis, Autoimmune orchitis, Autoimmune pancreatitis, Autoimmune retinopathy, Autoimmune urticaria, Axonal & neuronal neuropathy (AMAN), Baló disease, Behcet's disease, Benign mucosal pemphigoid, Bullous pemphigoid, Castleman disease (CD), Celiac disease, Chagas disease, Chronic inflammatory demyelinating polyneuropathy (CIDP), Chronic recurrent multifocal osteomyelitis (CRMO), Churg-Strauss Syndrome (CSS) or Eosinophilic Granulomatosis (EGPA), Cicatricial pemphigoid, Cogan's syndrome, Cold agglutinin disease, Congenital heart block, Coxsackie myocarditis, CREST syndrome, Crohn's disease, Dermatitis herpetiformis, Dermatomyositis, Devic's disease (neuromyelitis optica), Discoid lupus, Dressler's syndrome, Endometriosis, Eosinophilic esophagitis (EoE), Eosinophilic fasciitis, Erythema nodosum, Essential mixed cryoglobulinemia, Evans syndrome, Fibromyalgia, Fibrosing alveolitis, Giant cell arteritis (temporal arteritis), Giant cell myocarditis, Glomerulonephritis, Goodpasture's syndrome, Granulomatosis with Polyangiitis, Graves' disease, Guillain-Barre syndrome, Hashimoto's thyroiditis, Hemolytic anemia, Henoch-Schonlein purpura (HSP), Herpes gestationis or pemphigoid gestationis (PG), Hidradenitis Suppurativa (HS) (Acne Inversa), Hypogammalglobulinemia, IgA Nephropathy, IgG4-related sclerosing disease, Immune thrombocytopenic purpura (ITP), Inclusion body myositis (IBM), Interstitial cystitis (IC), Juvenile arthritis, Juvenile diabetes (Type 1 diabetes), Juvenile myositis (JM), Kawasaki disease, Lambert-Eaton syndrome, Leukocytoclastic vasculitis, Lichen planus, Lichen sclerosus, Ligneous conjunctivitis, Linear IgA disease (LAD), Lupus, Lyme disease chronic, Meniere's disease, Microscopic polyangiitis (MPA), Mixed connective tissue disease (MCTD), Mooren's ulcer, Mucha-Habermann disease, Multifocal Motor Neuropathy (MMN) or MMNCB, Multiple sclerosis, Myasthenia gravis, Myositis, Narcolepsy, Neonatal Lupus, Neuromyelitis optica, Neutropenia, Ocular cicatricial pemphigoid, Optic neuritis, Palindromic rheumatism (PR), PANDAS, Paraneoplastic cerebellar degeneration (PCD), Paroxysmal nocturnal hemoglobinuria (PNH), Parry Romberg syndrome, Pars planitis (peripheral uveitis), Parsonnage-Turner syndrome, Pemphigus, Peripheral neuropathy, Perivenous encephalomyelitis, Pernicious anemia (PA), POEMS syndrome, Polyarteritis nodosa, Polyglandular syndromes type I, II, III, Polymyalgia rheumatica, Polymyositis, Postmyocardial infarction syndrome, Postpericardiotomy syndrome, Primary biliary cirrhosis, Primary sclerosing cholangitis, Progesterone dermatitis, Psoriasis, Psoriatic arthritis, Pure red cell aplasia (PRCA), Pyoderma gangrenosum, Raynaud's phenomenon, Reactive Arthritis, Reflex sympathetic dystrophy, Relapsing polychondritis, Restless legs syndrome (RLS), Retroperitoneal fibrosis, Rheumatic fever, Rheumatoid arthritis, Sarcoidosis, Schmidt syndrome, Scleritis, Scleroderma, Sjögren's syndrome, Sperm & testicular autoimmunity, Stiff person syndrome (SPS), Subacute bacterial endocarditis (SBE), Susac's syndrome, Sympathetic ophthalmia (SO), Takayasu's arteritis, Temporal arteritis/Giant cell arteritis, Thrombocytopenic purpura (TTP), Tolosa-Hunt syndrome (THS), Transverse myelitis, Type 1 diabetes, Ulcerative colitis (UC), Undifferentiated connective tissue disease (UCTD), Uveitis, Vasculitis, Vitiligo, Vogt-Koyanagi-Harada Disease, or Wegener's granulomatosis.

[0222] In some embodiments of the compositions and methods of the disclosure, a disease or disorder of the disclosure includes, but is not limited to, an inflammatory disease or disorder.

[0223] In some embodiments of the compositions and methods of the disclosure, a disease or disorder of the disclosure includes, but is not limited to, a metabolic disease or disorder.

[0224] In some embodiments of the compositions and methods of the disclosure, a disease or disorder of the disclosure includes, but is not limited to, a degenerative or a progressive disease or disorder. In some embodiments, the degenerative or a progressive disease or disorder includes, but is not limited to, amyotrophic lateral sclerosis (ALS), Huntington's disease, Alzheimer's disease, and aging.

[0225] In some embodiments of the compositions and methods of the disclosure, a disease or disorder of the disclosure includes, but is not limited to, an infectious disease or disorder.

[0226] In some embodiments of the compositions and methods of the disclosure, a disease or disorder of the disclosure includes, but is not limited to, a pediatric or a developmental disease or disorder.

[0227] In some embodiments of the compositions and methods of the disclosure, a disease or disorder of the disclosure includes, but is not limited to, a cardiovascular disease or disorder.

[0228] In some embodiments of the compositions and methods of the disclosure, a disease or disorder of the disclosure includes, but is not limited to, a proliferative disease or disorder. In some embodiments, the proliferative disease or disorder is a cancer. In some embodiments, the cancer includes, but is not limited to, Acute Lymphoblastic Leukemia (ALL), Acute Myeloid Leukemia (AML), Adrenocortical Carcinoma, AIDS-Related Cancers, Kaposi Sarcoma (Soft Tissue Sarcoma), AIDS-Related Lymphoma (Lymphoma), Primary CNS Lymphoma (Lymphoma), Anal Cancer, Appendix Cancer, Gastrointestinal Carcinoid Tumors, Astrocytomas, Atypical Teratoid/Rhabdoid Tumor, Central Nervous System (Brain Cancer), Basal Cell Carcinoma, Bile Duct Cancer, Bladder Cancer, Bone Cancer, Ewing Sarcoma, Osteosarcoma, Malignant Fibrous Histiocytoma, Brain Tumors, Breast Cancer, Burkitt Lymphoma, Carcinoid Tumor, Carcinoma, Cardiac (Heart) Tumors, Embryonal Tumors, Germ Cell Tumor, Primary CNS Lymphoma, Cervical Cancer, Cholangiocarcinoma, Chordoma, Chronic Lymphocytic Leukemia (CLL), Chronic Myelogenous Leukemia (CML), Chronic Myeloproliferative Neoplasms, Colorectal Cancer , Craniopharyngioma, Cutaneous T-Cell Lymphoma, Ductal Carcinoma In Situ, Embryonal Tumors, Endometrial Cancer (Uterine Cancer), Ependymoma, Esophageal Cancer, Esthesioneuroblastoma (Head and Neck Cancer), Ewing Sarcoma (Bone Cancer), Extracranial Germ Cell Tumor, Extragonadal Germ Cell Tumor, Eye Cancer, Childhood Intraocular Melanoma, Intraocular Melanoma, Retinoblastoma, Fallopian Tube Cancer, Fibrous Histiocytoma of Bone, Malignant, and Osteosarcoma, Gallbladder Cancer, Gastric (Stomach) Cancer, Gastrointestinal Carcinoid Tumor, Gastrointestinal Stromal Tumors (GIST) (Soft Tissue Sarcoma), Childhood Gastrointestinal Stromal Tumors, Germ Cell Tumors, Childhood Extracranial Germ Cell Tumors, Extragonadal Germ Cell Tumors, Ovarian Germ Cell Tumors, Testicular Cancer, Gestational Trophoblastic Disease, Hairy Cell Leukemia, Head and Neck Cancer, Heart Tumors, Hepatocellular (Liver) Cancer, Histiocytosis, Hodgkin Lymphoma, Hypopharyngeal Cancer (Head and Neck Cancer), Intraocular Melanoma, Islet Cell Tumors, Pancreatic Neuroendocrine Tumors, Kaposi Sarcoma (Soft Tissue Sarcoma), Kidney (Renal Cell) Cancer, Langerhans Cell Histiocytosis, Laryngeal Cancer (Head and Neck Cancer), Leukemia, Lip and Oral Cavity Cancer (Head and Neck Cancer), Liver Cancer, Lung Cancer (Non-Small Cell and Small Cell), Childhood Lung Cancer, Lymphoma, Male Breast Cancer, Malignant Fibrous Histiocytoma of Bone and Osteosarcoma, Melanoma, Merkel Cell Carcinoma (Skin Cancer), Mesothelioma, Metastatic Squamous Neck Cancer with Occult Primary (Head and Neck Cancer), Midline Tract Carcinoma With NUT Gene Changes, Mouth Cancer (Head and Neck Cancer), Multiple Endocrine Neoplasia Syndromes, Multiple Myeloma/Plasma Cell Neoplasms, Mycosis Fungoides (Lymphoma), Myelodysplastic Syndromes, Myelodysplastic/Myeloproliferative Neoplasms, Nasal Cavity and Paranasal Sinus Cancer (Head and Neck Cancer), Nasopharyngeal Cancer (Head and Neck Cancer), Neuroblastoma, Non-Hodgkin Lymphoma, Non-Small Cell Lung Cancer, Oral Cancer, Lip and Oral Cavity Cancer and Oropharyngeal Cancer, Osteosarcoma and Malignant Fibrous Histiocytoma of Bone, Ovarian Cancer, Pancreatic Cancer, Pancreatic Neuroendocrine Tumors (Islet Cell Tumors), Papillomatosis, Paraganglioma, Parathyroid Cancer, Penile Cancer, Pharyngeal Cancer (Head and Neck Cancer), Pheochromocytoma , Plasma Cell Neoplasm/Multiple Myeloma, Pleuropulmonary Blastoma, Pregnancy and Breast Cancer, Primary Central Nervous System (CNS) Lymphoma, Primary Peritoneal Cancer, Prostate Cancer, Rectal Cancer, Recurrent Cancer, Renal Cell (Kidney) Cancer, Retinoblastoma, Rhabdomyosarcoma, Childhood (Soft Tissue Sarcoma), Salivary Gland Cancer (Head and Neck Cancer), Sarcoma, Childhood Rhabdomyosarcoma (Soft Tissue Sarcoma), Childhood Vascular Tumors (Soft Tissue Sarcoma), Ewing Sarcoma (Bone Cancer), Kaposi Sarcoma (Soft Tissue Sarcoma), Osteosarcoma (Bone Cancer), Uterine Sarcoma, Sézary Syndrome, Lymphoma, Skin Cancer, Small Cell Lung Cancer, Small Intestine Cancer, Soft Tissue Sarcoma, Squamous Cell Carcinoma of the Skin, Squamous Neck Cancer, Stomach (Gastric) Cancer, T-Cell Lymphoma, Testicular Cancer, Throat Cancer (Head and Neck Cancer), Nasopharyngeal Cancer, Oropharyngeal Cancer, Hypopharyngeal Cancer, Thymoma and Thymic Carcinoma , Thyroid Cancer, Transitional Cell Cancer of the Renal Pelvis and Ureter, Renal Cell Cancer, Urethral Cancer, Uterine Sarcoma, Vaginal Cancer, Vascular Tumors (Soft Tissue Sarcoma), Vulvar Cancer, Wilms Tumor and Other Childhood Kidney Tumors.

[0229] In some embodiments of the methods of the disclosure, a subject of the disclosure has been diagnosed with the disease or disorder. In some embodiments, the subject of the disclosure presents at least one sign or symptom of the disease or disorder. In some embodiments, the subject has a biomarker predictive of a risk of developing the disease or disorder. In some embodiments, the biomarker is a genetic mutation.

[0230] In some embodiments of the methods of the disclosure, a subject of the disclosure is female. In some embodiments of the methods of the disclosure, a subject of the disclosure is male. In some embodiments, a subject of the disclosure has two XX or XY chromosomes. In some embodiments, a subject of the disclosure has two XX or XY chromosomes and a third chromosome, either an X or a Y.

[0231] In some embodiments of the methods of the disclosure, a subject of the disclosure is a neonate, an infant, a child, an adult, a senior adult, or an elderly adult. In some embodiments of the methods of the disclosure, a subject of the disclosure is at least 1, 2, 3, 4, 5,6, 7, 8, 9, 10, 11, 12, 13, 14, 15, 16, 17, 18, 19, 20, 21, 22, 23, 24, 25, 26, 27,28, 29, 30 or 31 days old. In some embodiments of the methods of the disclosure, a subject of the disclosure is at least 1, 2, 3, 4, 5, 6, 7, 8, 9, 10, 11 or 12 months old. In some embodiments of the methods of the disclosure, a subject of the disclosure is at least 1, 2, 3, 4, 5, 6, 7, 8, 9, 10, 15, 20, 25, 30, 35, 40, 45, 50, 55, 60, 65, 70, 75, 80, 85, 90, 95, 100 or any number of years or partial years in between of age.

[0232] In some embodiments of the methods of the disclosure, a subject of the disclosure is a mammal. In some embodiments, a subject of the disclosure is a non-human mammal.

[0233] In some embodiments of the methods of the disclosure, a subject of the disclosure is a human.

[0234] In some embodiments of the methods of the disclosure, a therapeutically effective amount comprises a single dose of a composition of the disclosure. In some embodiments, a therapeutically effective amount comprises a therapeutically effective amount comprises at least one dose of a composition of the disclosure. In some embodiments, a therapeutically effective amount comprises a therapeutically effective amount comprises one or more dose(s) of a composition of the disclosure.

[0235] In some embodiments of the methods of the disclosure, a therapeutically effective amount eliminates a sign or symptom of the disease or disorder. In some embodiments, a therapeutically effective amount reduces a severity of a sign or symptom of the disease or disorder.

[0236] In some embodiments of the methods of the disclosure, a therapeutically effective amount eliminates the disease or disorder.

[0237] In some embodiments of the methods of the disclosure, a therapeutically effective amount prevents an onset of a disease or disorder. In some embodiments, a therapeutically effective amount delays the onset of a disease or disorder. In some embodiments, a therapeutically effective amount reduces the severity of a sign or symptom of the disease or disorder. In some embodiments, a therapeutically effective amount improves a prognosis for the subject.

[0238] In some embodiments of the methods of the disclosure, a composition of the disclosure is administered to the subject systemically. In some embodiments, the composition of the disclosure is administered to the subject by an intravenous route. In some embodiments, the composition of the disclosure is administered to the subject by an injection or an infusion.

[0239] In some embodiments of the methods of the disclosure, a composition of the disclosure is administered to the subject locally. In some embodiments, the composition of the disclosure is administered to the subject by an intraosseous, intraocular, intracerebrospinal, or intraspinal route. In some embodiments, the composition of the disclosure is administered directly to the cerebral spinal fluid of the central nervous system. In some embodiments, the composition of the disclosure is administered directly to a tissue or fluid of the eye and does not have bioavailability outside of ocular structures. In some embodiments, the composition of the disclosure is administered to the subject by an injection or an infusion.

### Viral Particles

[0240] In some aspects, provided herein are viral particles comprising, consisting of, or consisting essentially of a vector comprising, consisting of, or consisting essentially of a polynucleotide encoding a fusion protein comprising, consisting of, or consisting essentially of: (i) a guide nucleotide sequence-programmable RNA binding protein; and (ii) an EIF4E protein. In other aspects, provided herein are viral particles comprising, consisting of, or consisting essentially of a vector comprising, consisting of, or consisting essentially of a polynucleotide encoding a fusion protein comprising, consisting of, or consisting essentially of: (i) a guide nucleotide sequence-programmable RNA binding protein; and (ii) an EIF4E-BP1 protein. In some embodiments, the polynucleotides further comprise a nucleic acid sequence encoding a linker peptide.

[0241] In general, methods of packaging genetic material such as RNA or DNA into one or more vectors is well known in the art. For example, the genetic material may be packaged using a packaging vector and cell lines and introduced via traditional recombinant methods.

[0242] In some embodiments, the packaging vector may include, but is not limited to retroviral vector, lentiviral vector, adenoviral vector, and adeno-associated viral vector. The packaging vector contains elements and sequences that facilitate the delivery of genetic materials into cells. For example, the retroviral constructs are packaging plasmids comprising at least one retroviral helper DNA sequence derived from a replication-incompetent retroviral genome encoding in trans all virion proteins required to package a replication incompetent retroviral vector, and for producing virion proteins capable of packaging the replication-incompetent retroviral vector at high titer, without the production of replication-competent helper virus. The retroviral DNA sequence lacks the region encoding the native enhancer and/or promoter of the viral 5′ LTR of the virus, and lacks both the psi function sequence responsible for packaging helper genome and the 3′ LTR, but encodes a foreign polyadenylation site, for example the SV40 polyadenylation site, and a foreign enhancer and/or promoter which directs efficient transcription in a cell type where virus production is desired. The retrovirus is a leukemia virus such as a Moloney Murine Leukemia Virus (MMLV), the Human Immunodeficiency Virus (HIV), or the Gibbon Ape Leukemia virus (GALV). The foreign enhancer and promoter may be the human cytomegalovirus (HCMV) immediate early (IE) enhancer and promoter, the enhancer and promoter (U3 region) of the Moloney Murine Sarcoma Virus (MMSV), the U3 region of Rous Sarcoma Virus (RSV), the U3 region of Spleen Focus Forming Virus (SFFV), or the HCMV IE enhancer joined to the native Moloney Murine Leukemia Virus (MMLV) promoter.

[0243] The retroviral packaging plasmid may consist of two retroviral helper DNA sequences encoded by plasmid based expression vectors, for example where a first helper sequence contains a cDNA encoding the gag and pol proteins of ecotropic MMLV or GALV and a second helper sequence contains a cDNA encoding the env protein. The Env gene, which determines the host range, may be derived from the genes encoding xenotropic, amphotropic, ecotropic, polytropic (mink focus forming) or 10A1 murine leukemia virus env proteins, or the Gibbon Ape Leukemia Virus (GALV env protein, the Human Immunodeficiency Virus env (gp160) protein, the Vesicular Stomatitus Virus (VSV) G protein, the Human T cell leukemia (HTLV) type I and II env gene products, chimeric envelope gene derived from combinations of one or more of the aforementioned env genes or chimeric envelope genes encoding the cytoplasmic and transmembrane of the aforementioned env gene products and a monoclonal antibody directed against a specific surface molecule on a desired target cell. Similar vector based systems may employ other vectors such as sleeping beauty vectors or transposon elements.

[0244] The resulting packaged expression systems may then be introduced via an appropriate route of administration, discussed in detail with respect to the method aspects disclosed herein.

### Compositions

[0245] Also provided by this invention is a composition comprising any one or more of the fusion proteins, or the nucleic acid sequences encoding the fusion proteins, and a carrier. In some embodiments, a composition can be one or more polynucleotides encoding a guide nucleotide sequence-programmable RNA binding protein and a translation modifier protein. In some embodiments, a composition can be any of the fusion proteins described herein. In some embodiments, a composition can be any polynucleotide described herein. In some embodiments, the carrier is a pharmaceutically acceptable carrier. In some embodiments, the composition is a pharmaceutical composition comprising one or more fusion proteins, or one or more nucleic acid sequences encoding the fusion proteins, and a pharmaceutically acceptable carrier. In some embodiments, the composition or pharmaceutical composition further comprises one or more gRNAs, crRNAs, and/or tracrRNAs.

[0246] Briefly, pharmaceutical compositions of the present invention may comprise an fusion proteins or a polynucleotide encoding said fusion protein, optionally comprised in an AAV, which is optionally also immune orthogonal, in combination with one or more pharmaceutically or physiologically acceptable carriers, diluents or excipients. Such compositions may comprise buffers such as neutral buffered saline, phosphate buffered saline and the like; carbohydrates such as glucose, mannose, sucrose or dextrans, mannitol; proteins; polypeptides or amino acids such as glycine; antioxidants; chelating agents such as EDTA or glutathione; adjuvants (e.g., aluminum hydroxide); and preservatives. Compositions of the present disclosure may be formulated for oral, intravenous, topical, enteral, and/or parenteral administration. In certain embodiments, the compositions of the present disclosure are formulated for intravenous administration.

### Kits

[0247] In some aspects, provided herein are kits comprising, consisting of, or consisting essentially of one or more fusion proteins, polynucleotides encoding a fusion protein, vectors comprising the polynucleotide, or viral particles comprising the vector, wherein the fusion protein comprises, consists of, or consists essentially of: (a) a guide nucleotide sequence-programmable RNA binding protein; and (b) an EIF4E protein; or wherein the fusion protein comprises, consists of, or consists essentially of: (a) a guide nucleotide sequence-programmable RNA binding protein; and (b) an EIF4E-BP1 protein. In some embodiments, the kits further comprise, consist of, or consist essentially of instructions for use.

[0248] In some embodiments of the kits described herein, the kits further comprise, consist of, or consist essentially of one or more nucleic acids selected from: (i) a gRNA; (ii) a crRNA and a tracrRNA; (iii) a PAMmer oligonucleotide; and (iv) a vector for expressing the nucleic acid of (i), (ii), or (iii).

[0249] In some embodiments, the kits further comprise, consist of, or consist essentially of one or more reagents for carrying out a method of the disclosure. Non-limiting examples of such reagents comprise viral packaging cells, viral vectors, vector backbones, gRNAs, transfection reagents, transduction reagents, viral particles, and PCR primers. Accordingly, other embodiments are within the scope of the following claims.

### Example Embodiments

[0250] Embodiment 1 is a composition comprising one or more polynucleotides encoding:
   [0251] (i) a guide nucleotide sequence-programmable RNA binding protein; and
   [0252] (ii) a translation modifier protein.
[0253] Embodiment 2 is the composition of embodiment 1, wherein the guide nucleotide sequence-programmable RNA binding protein comprises at least one of Cas9, modified Cas9, Cas13a, Cas13b, CasRX/Cas13d, CasM and a biological equivalent of each thereof.
[0254] Embodiment 3 is the composition of embodiment 2, wherein the guide nucleotide sequence-programmable RNA binding protein comprises at least one of Steptococcus pyogenes Cas9 (spCas9), Staphylococcus aureus Cas9 (saCas9), Francisella novicida Cas9 (FnCas9), Neisseria meningitidis Cas9 (nmCas9), Streptococcus thermophilus 1 Cas9 (St1Cas9), Streptococcus thermophilus 3 Cas9 (St3Cas9), and Brevibacillus laterosporus Cas9 (BlatCas9).
[0255] Embodiment 4 is the composition of embodiment 2 or 3, wherein the guide nucleotide sequence-programmable RNA binding protein is nuclease inactive.
[0256] Embodiment 5 is the composition of any one of the preceding embodiments, wherein the translation modifier protein is at least one of translation initiation factor 4E (EIF4E) (SEQ ID NO: 52-59), eukaryotic translation initiation factor 4E-binding protein (EIF4E-BP1) (SEQ ID NO: 61-62), ubiquitin-associated protein 2-like (UBAP2L) (SEQ ID NO: 64-71), and a biological equivalent of each thereof.
[0257] Embodiment 6 is the composition of any one of the preceding embodiments, wherein the translation modifier protein is encoded by a polynucleotide having a sequence comprising all or part of at least one of SEQ ID NO: 52-55, SEQ ID NO: 61, SEQ ID NO: 64-67, SEQ ID NO: 94-193, SEQ ID NO: 285, SEQ ID NO: 320-348, and a biological equivalent of each thereof.
[0258] Embodiment 7 is the composition of any one of the preceding embodiments, wherein the translation modifier protein has an amino acid sequence comprising all or part of at least one of SEQ ID NO: 56-59, SEQ ID NO: 62, SEQ ID NO: 68-71, and a biological equivalent of each thereof.
[0259] Embodiment 8 is the composition of any one of the previous embodiments, further comprising a linker.
[0260] Embodiment 9 is the composition of embodiment 8, wherein the linker is a peptide linker.
[0261] Embodiment 10 is the composition of embodiment 9, wherein the peptide linker comprises one or more repeats of the tri-peptide GGS.
[0262] Embodiment 11 is the composition of embodiment 8, wherein the linker is a non-peptide linker.
[0263] Embodiment 12 is the composition of embodiment 11, wherein the non-peptide linker comprises polyethylene glycol (PEG), polypropylene glycol (PPG), co-poly(ethylene/propylene) glycol, polyoxyethylene (POE), polyurethane, polyphosphazene, polysaccharides, dextran, polyvinyl alcohol, polyvinylpyrrolidones, polyvinyl ethyl ether, polyacryl amide, polyacrylate, polycyanoacrylates, lipid polymers, chitins, hyaluronic acid, heparin, or an alkyl linker.
[0264] Embodiment 13 is the composition of any one of the preceding embodiments, wherein the guide nucleotide sequence-programmable RNA binding protein is bound to a guide RNA (gRNA), a crisprRNA (crRNA), or a trans-activating crRNA (tracrRNA).
[0265] Embodiment 14 is the composition of any one of the preceding embodiments, wherein one or more kinase phosphorylation domains of the eukaryotic translation modifier protein is mutated.
[0266] Embodiment 15 is the composition of any one of the preceding embodiments, further comprising a vector.
[0267] Embodiment 16 is the vector of embodiment 15, wherein the vector is an adenoviral vector, an adeno-associated viral vector, or a lentiviral vector.
[0268] Embodiment 17 is the vector of embodiment 15 or 16, further comprising an expression control element.
[0269] Embodiment 18 is the vector of embodiments 15-17, further comprising a selectable marker.
[0270] Embodiment 19 is the vector of any one of embodiments 15-18, further comprising a polynucleotide encoding either (i) a gRNA, or (ii) a crRNA and a tracrRNA.
[0271] Embodiment 20 is the vector of embodiment 19, wherein the gRNA or the crRNA comprises a nucleotide sequence complementary to a target RNA.
[0272] Embodiment 21 is a system for post-transcriptional gene regulation, the system comprising:
   [0273] (i) a composition according to any one of embodiments 1-20; and
   [0274] (ii) a gRNA; or
   [0275] (iii) a crRNA and a tracrRNA;
   [0276] wherein the gRNA or the crRNA comprises a sequence complementary to a target mRNA.
[0277] Embodiment 22 is a method for post-transcriptionally regulating gene expression, the method comprising contacting a target mRNA with a composition according to any one of embodiments 1-20, wherein the guide nucleotide sequence-programmable RNA binding protein binds a gRNA or a crRNA that hybridizes to a region of the target RNA.
[0278] Embodiment 23 is a fusion protein comprising:
   [0279] (i) a RNA binding protein; and
   [0280] (ii) a translation modifier protein.
[0281] Embodiment 24 is the fusion protein of embodiment 23, wherein the RNA binding protein is selected from a Pumilio and FBF (PUF) protein, a Pumilio-based assembly (PUMBY) protein, a pentatricopeptide repeat (PPR) protein, and a biological equivalent of each thereof.
[0282] Embodiment 25 is the fusion protein of embodiment 23, wherein the RNA binding protein is a Pumilio and FBF (PUF) protein.
[0283] Embodiment 26 is the fusion protein of embodiment 23, wherein the RNA binding protein is a Pumilio-based assembly (PUMBY) protein.
[0284] Embodiment 27 is the fusion protein of embodiment 23, wherein the RNA binding protein is a pentatricopeptide repeat (PPR) protein.
[0285] Embodiment 28 is the composition of any one of embodiments 23-27, wherein the translation modifier protein is at least one of translation initiation factor 4E (EIF4E) (SEQ ID NO: 52-59), eukaryotic translation initiation factor 4E-binding protein (EIF4E-BP1) (SEQ ID NO: 61-62), ubiquitin-associated protein 2-like (UBAP2L) (SEQ ID NO: 64-71), and a biological equivalent of each thereof.
[0286] Embodiment 29 is the composition of any one of embodiments 23-28, wherein the translation modifier protein is encoded by a polynucleotide having a sequence comprising all or part of at least one of SEQ ID NO: 52-55, SEQ ID NO: 61, SEQ ID NO: 64-67, SEQ ID NO: 94-193, SEQ ID NO: 285, SEQ ID NO: 320-348, and a biological equivalent of each thereof.
[0287] Embodiment 30 is the composition of any one of embodiments 23-29, wherein the translation modifier protein has an amino acid sequence comprising all or part of at least one of SEQ ID NO: 56-59, SEQ ID NO: 62, SEQ ID NO: 68-71, and a biological equivalent of each thereof.
[0288] Embodiment 31 is the composition of any one of the preceding embodiments, wherein the translatin modifier protein is eukaryotic.
[0289] Embodiment 32 is the composition of any one of the preceding embodiments, wherein the translatin modifier protein is human.
[0290] Embodiment 33 is the composition of any one of the preceding embodiments, wherein the translatin modifier protein is prokaryotic.
[0291] Embodiment 34 is a fusion protein comprising:
   [0292] (i) a guide nucleotide sequence-programmable RNA binding protein; and
   [0293] (ii) a eukaryotic translation initiation factor 4E (EIF4E) protein.
[0294] Embodiment 35 is the fusion protein of embodiment 34, wherein the guide nucleotide sequence-programmable RNA binding protein is selected from: Cas9, modified Cas9, Cas13a, Cas13b, CasRX/Cas13d, and a biological equivalent of each thereof. Embodiment 36 is the fusion protein of embodiment 35, wherein the guide nucleotide sequence-programmable RNA binding protein is selected from: Steptococcus pyogenes Cas9 (spCas9), Staphylococcus aureus Cas9 (saCas9), Francisella novicida Cas9 (FnCas9), Neisseria meningitidis Cas9 (nmCas9), Streptococcus thermophilus 1 Cas9 (St1Cas9), Streptococcus thermophilus 3 Cas9 (St3Cas9), and Brevibacillus laterosporus Cas9 (BlatCas9).
[0295] Embodiment 37 is the fusion protein of embodiment 35 or 36, wherein the guide nucleotide sequence-programmable RNA binding protein is nuclease inactive.
[0296] Embodiment 38 is the fusion protein of any one of embodiments 34-37, further comprising a linker.
[0297] Embodiment 39 is the fusion protein of embodiment 38, wherein the linker is a peptide linker.
[0298] Embodiment 40 is the fusion protein of embodiment 39, wherein the peptide linker comprises one or more repeats of the tri-peptide GGS.
[0299] Embodiment 41 is the fusion protein of embodiment 38, wherein the linker is a non-peptide linker.
[0300] Embodiment 42 is the fusion protein of embodiment 41, wherein the non-peptide linker comprises polyethylene glycol (PEG), polypropylene glycol (PPG), co-poly(ethylene/propylene) glycol, polyoxyethylene (POE), polyurethane, polyphosphazene, polysaccharides, dextran, polyvinyl alcohol, polyvinylpyrrolidones, polyvinyl ethyl ether, polyacryl amide, polyacrylate, polycyanoacrylates, lipid polymers, chitins, hyaluronic acid, heparin, or an alkyl linker.
[0301] Embodiment 43 is the fusion protein of any one of embodiments 38-42, wherein the fusion protein comprises the structure NH₂-[EIF4E]-[linker]-[guide nucleotide sequence-programmable RNA binding protein]-COOH.
[0302] Embodiment 44 is the fusion protein of any one of embodiments 38-42, wherein the fusion protein comprises the structure NH₂-[guide nucleotide sequence-programmable RNA binding protein]-[linker]-[EIF4E]-COOH.
[0303] Embodiment 45 is the fusion protein of any one of embodiments 34-44, wherein the guide nucleotide sequence-programmable RNA binding protein is bound to a guide RNA (gRNA), a crisprRNA (crRNA), or a trans-activating crRNA (tracrRNA).
[0304] Embodiment 46 is the fusion protein of any one of embodiments 34-45, wherein the EIF4E protein is encoded by a polynucleotide having a sequence comprising all or part of a sequence selected from SEQ ID NO: 52, SEQ ID NO: 53, SEQ ID NO: 54, SEQ ID NO: 55, and a biological equivalent of each thereof.
[0305] Embodiment 47 is the fusion protein of any one of embodiments 34-46, wherein the EIF4E protein has an amino acid sequence comprising all or part of a sequence selected from SEQ ID NO: 56, SEQ ID NO: 57, SEQ ID NO: 58, SEQ ID NO: 59, and a biological equivalent of each thereof.
[0306] Embodiment 48 is the fusion protein of any one of embodiments 34-47, wherein one or more kinase phosphorylation domains of the EIF4E is mutated.
[0307] Embodiment 49 is the fusion protein of embodiment 48, wherein the mutated EIF4E is constituitively active.
[0308] Embodiment 50 is a fusion protein comprising:
   [0309] (i) a guide nucleotide sequence-programmable RNA binding protein; and
   [0310] (ii) a eukaryotic translation initiation factor 4E-binding protein 1 (EIF4E-BP1) protein.
[0311] Embodiment 51 is the fusion protein of embodiment 50, wherein the guide nucleotide sequence-programmable RNA binding protein is selected from: Cas9, modified Cas9, Cas13a, Cas13b, CasRX/Cas13d, and a biological equivalent of each thereof.
[0312] Embodiment 52 is the fusion protein of embodiment 51, wherein the guide nucleotide sequence-programmable RNA binding protein is selected from: Streptococcus pyogenes Cas9 (spCas9), Staphylococcus aureus Cas9 (saCas9), Francisella novicida Cas9 (FnCas9), Neisseria meningitidis Cas9 (nmCas9), Streptococcus thermophilus 1 Cas9 (St1Cas9), Streptococcus thermophilus 3 Cas9 (St3Cas9), and Brevibacillus laterosporus Cas9 (BlatCas9).
[0313] Embodiment 53 is the fusion protein of embodiment 51 or 52, wherein the guide nucleotide sequence-programmable RNA binding protein is nuclease inactive.
[0314] Embodiment 54 is the fusion protein of any one of embodiments 50-53, further comprising a linker.
[0315] Embodiment 55 is the fusion protein of embodiment 54, wherein the linker is a peptide linker.
[0316] Embodiment 56 is the fusion protein of embodiment 55, wherein the peptide linker comprises one or more repeats of the tri-peptide GGS.
[0317] Embodiment 57 is the fusion protein of embodiment 54, wherein the linker is a non-peptide linker.
[0318] Embodiment 58 is the fusion protein of embodiment 57, wherein the non-peptide linker comprises polyethylene glycol (PEG), polypropylene glycol (PPG), co-poly(ethylene/propylene) glycol, polyoxyethylene (POE), polyurethane, polyphosphazene, polysaccharides, dextran, polyvinyl alcohol, polyvinylpyrrolidones, polyvinyl ethyl ether, polyacryl amide, polyacrylate, polycyanoacrylates, lipid polymers, chitins, hyaluronic acid, heparin, or an alkyl linker.
[0319] Embodiment 59 is the fusion protein of any one of embodiments 54-58, wherein the fusion protein comprises the structure NH₂-[EIF4E-BP1]-[linker]-[guide nucleotide sequence-programmable RNA binding protein]-COOH.
[0320] Embodiment 60 is the fusion protein of any one of embodiments 54-58, wherein the fusion protein comprises the structure NH₂-[guide nucleotide sequence-programmable RNA binding protein]-[linker]-[EIF4E-BP1]-COOH.
[0321] Embodiment 61 is the fusion protein of any one of embodiments 50-60, wherein the guide nucleotide sequence-programmable RNA binding protein is bound to a guide RNA (gRNA), a crisprRNA (crRNA), or a trans-activating crRNA (tracrRNA).
[0322] Embodiment 62 is the fusion protein of any one of embodiments 50-61, wherein the EIF4E-BP1 protein is encoded by a polynucleotide having a sequence comprising all or part of SEQ ID NO: 61 or a biological equivalent thereof.
[0323] Embodiment 63 is the fusion protein of any one of embodiments 50-62, wherein the EIF4E-BP1 protein has an amino acid sequence comprising all or part of SEQ ID NO: 62 or a biological equivalent thereof.
[0324] Embodiment 64 is the fusion protein any one of embodiments 50-63, wherein one or more kinase phosphorylation domains of the EIF4E-BP1 protein is mutated.
[0325] Embodiment 65 is the fusion protein of embodiment 64, wherein the mutated EIF4E-BP1 is constituitively active.
[0326] Embodiment 66 is a polynucleotide encoding the fusion protein of any one of embodiments 34-65.
[0327] Embodiment 67 is a vector comprising the polynucleotide of embodiment 66, optionally wherein the vector is an adenoviral vector, an adeno-associated viral vector, or a lentiviral vector.
[0328] Embodiment 68 is the vector of embodiment 67, further comprising an expression control element.
[0329] Embodiment 69 is the vector of embodiment 67 or 68, further comprising a selectable marker.
[0330] Embodiment 70 is the vector of any one of embodiments 67-69, further comprising a polynucleotide encoding either (i) a gRNA, or (ii) a crRNA and a tracrRNA.
[0331] Embodiment 71 is the vector of embodiment 70, wherein the gRNA or the crRNA comprises a nucleotide sequence complementary to a target RNA.
[0332] Embodiment 72 is a viral particle comprising the fusion protein of any one of embodiments 34-65, the polynucleotide of embodiment 66, or the vector of any one of embodiments 67-71.
[0333] Embodiment 73 is a cell comprising the fusion protein of any one of embodiments 34-65, the polynucleotide of embodiment 66, the vector of any one of embodiments 67-71, or the viral particle of embodiment 72.
[0334] Embodiment 74 is the cell of embodiment 73, wherein the cell is a eukaryotic cell.
[0335] Embodiment 75 is the cell of embodiment 73, wherein the cell is a prokaryotic cell.
[0336] Embodiment 76 is the cell of embodiment 74, wherein the cell is a mammalian cell, optionally a bovine, murine, feline, equine, porcine, canine, simian, or human cell.
[0337] Embodiment 77 is a system for post-transcriptional gene regulation, the system comprising:
   [0338] (i) a fusion protein according to any one of embodiments 34-65; and
   [0339] (ii) a gRNA; or
   [0340] (iii) a crRNA and a tracrRNA;
   [0341] wherein the gRNA or the crRNA comprises a sequence complementary to a target mRNA.
[0342] Embodiment 78 is a system for increasing translation of a target mRNA, the system comprising:
   [0343] (i) a fusion protein according to any one of embodiments 34-39; and
   [0344] (ii) a gRNA; or
   [0345] (iii) a crRNA and a tracrRNA;
   [0346] wherein the gRNA or the crRNA comprises a sequence complementary to a target mRNA.
[0347] Embodiment 79 is a system for decreasing translation of a target mRNA, the system comprising:
   [0348] (i) a fusion protein according to any one of embodiments 50-65; and
   [0349] (ii) a gRNA; or
   [0350] (iii) a crRNA and a tracrRNA;
   [0351] wherein the gRNA or the crRNA comprises a sequence complementary to a target mRNA.
[0352] Embodiment 80 is the system of any one of embodiments 77-79, further comprising a PAMmer.
[0353] Embodiment 81 is the system of any one of embodiments 77-79, wherein the target mRNA does not comprise a PAM sequence or complement thereof.
[0354] Embodiment 82 is a method for post-transcriptionally increasing gene expression, the method comprising contacting a target mRNA with a fusion protein according to any one of embodiments 34-49, wherein the guide nucleotide sequence-programmable RNA binding protein binds a gRNA or a crRNA that hybridizes to a region of the target RNA.
[0355] Embodiment 83 is a method for post-transcriptionally decreasing gene expression, the method comprising contacting a target mRNA with a fusion protein according to any one of embodiments 50-65, wherein the guide nucleotide sequence-programmable RNA binding protein binds a gRNA or a crRNA that hybridizes to a region of the target RNA.
[0356] Embodiment 84 is the method of embodiment 82 or 83, wherein the target mRNA comprises a PAM sequence or complement thereof.
[0357] Embodiment 85 is the method of embodiment 82 or 83, wherein the target mRNA does not comprise a PAM sequence or complement thereof.
[0358] Embodiment 86 is the method of any one of embodiments 82-85, wherein the target mRNA is in a cell.
[0359] Embodiment 87 is the method of embodiment 86, wherein the cell is a eukaryotic cell.
[0360] Embodiment 88 is the method of embodiment 86, wherein the cell is a prokaryotic cell.
[0361] Embodiment 89 is the method of embodiment 87, wherein the eukaryotic cell is a mammalian cell, optionally a bovine, murine, feline, equine, porcine, canine, simian, or human cell.
[0362] Embodiment 90 is the method of any one of embodiments 86-89, wherein the cell is in a subject.
[0363] Embodiment 91 is a method for treating a disease or condition in a subject in need thereof, the method comprising administering the fusion protein of any one of embodiments 34-65, the polynucleotide of embodiment 66, the vector of any one of embodiments 67-71, or the viral particle of embodiment 72 to the subject, thereby increasing or decreasing translation of a target mRNA in the subject.
[0364] Embodiment 92 is the method of embodiment 90 or 91, wherein the subject is a human.
[0365] Embodiment 93 is the method of embodiment 91, further comprising administering to the subject: (i) a gRNA complementary to the mRNA, or (ii) a crRNA complementary to the mRNA and a tracrRNA.
[0366] Embodiment 94 is the method of embodiment 93, further comprising administering to the subject a PAMmer.
[0367] Embodiment 95 is a kit comprising one or more of: the fusion protein of any one of embodiments 34-65, the polynucleotide of embodiment 66, the vector of any one of embodiments 67-71, or the viral particle of embodiment 72 to the subject, and optionally instructions for use.
[0368] Embodiment 96 is the kit embodiment 95, further comprising one or more nucleic acids selected from:
   [0369] (i) a gRNA;
   [0370] (ii) a crRNA and a tracrRNA;
   [0371] (iii) a PAMmer; and
   [0372] (iv) a vector for expressing the nucleic acid of (i), (ii), or (iii).
[0373] Embodiment 97 is a non-human transgenic animal comprising a fusion protein or viral vector as described herein.
[0374] Embodiment 98 is a fusion RNA comprising:
   [0375] (i) a guide nucleotide sequence-programmable RNA; and
   [0376] (ii) one or more internal ribosome entry sites (IRES).
[0377] Embodiment 99 is the fusion RNA of embodiment 98, wherein the guide nucleotide sequence-programmable RNA is a guide RNA (gRNA) or a crisprRNA (crRNA).
[0378] Embodiment 100 is the fusion RNA of embodiment 99, wherein the guide nucleotide sequence-programmable RNA is derived from a guide RNA scaffold from Steptococcus pyogenes, Staphilococcus aureus, Francisella novicida, Neisseria meningitidis, Streptococcus thermophilus, or Brevibacillus laterosporus.
[0379] Embodiment 101 is the fusion RNA of any one of embodiments 98-100, wherein the IRES is a type I or a type II IRES.
[0380] Embodiment 102 is the fusion RNA of any one of embodiments 98-101, wherein the IRES is a viral IRES or a eukaryotic IRES.
[0381] Embodiment 103 is the fusion RNA of any one of embodiments 98-102, wherein the IRES is selected from a Poliovirus IRES, Rhinovirus IRES, Encephalomyocarditis virus IRES (EMCV-IRES), Picornavirus IRES, Foot-and-mouth disease virus IRES (FMDV-IRES), Aphthovirus IRES, Kaposi's sarcoma-associated herpesvirus IRES (KSHV-IRES), Hepatitis A IRES, Hepatitis C IRES, Classical swine fever virus IRES, Pestivirus IRES, Bovine viral diarrhea virus IRES, Friend murine leukemia IRES, Moloney murine leukemia IRES (MMLV-IRES), Rous sarcoma virus IRES, Human immunodeficiency virus IRES (HIV-IRES), Plautia stali intestine virus IRES, Cripavirus IRES, Cricket paralysis virus IRES, Triatoma virus IRES, Rhopalosiphum padi virus IRES, Marek's disease virus IRES, Fibroblast growth factor (FGF-1 IRES and FGF-2 IRES), Platelet-derived growth factor B (PDGF/c-sis IRES), Vascular endothelial growth factor (VEGF IRES), and an Insulin-like growth factor 2 (IGF-II IRES).
[0382] Embodiment 104 is the fusion RNA of any one of embodiments 98-103, further comprising a linker sequence RNA located between the guide nucleotide sequence-programmable RNA and the IRES.
[0383] Embodiment 105 is the fusion RNA of embodiment 104, wherein the fusion RNA comprises the structure 5′-[guide nucleotide sequence-programmable RNA]-[linker sequence]-[IRES]-3′.
[0384] Embodiment 106 is the fusion RNA of embodiment 104, wherein the fusion RNA comprises the structure 5′-[IRES]-[linker sequence]-[guide nucleotide sequence-programmable RNA]-3′.
[0385] Embodiment 107 is the fusion RNA of any one of embodiments 98-106, wherein the guide nucleotide sequence-programmable RNA comprises a nucleotide sequence complementary to a target RNA.
[0386] Embodiment 108 is a polynucleotide encoding the fusion RNA of any one of embodiments 98-107.
[0387] Embodiment 109 is a vector comprising the polynucleotide of embodiment 108, optionally wherein the vector is an adenoviral vector, an adeno-associated viral vector, or a lentiviral vector.
[0388] Embodiment 110 is the vector of embodiment 109, further comprising an expression control element.
[0389] Embodiment 111 is the vector of embodiment 109 or 110, further comprising a selectable marker.
[0390] Embodiment 112 is the vector of any one of embodiments 109-111, further comprising a polynucleotide encoding a tracrRNA.
[0391] Embodiment 113 is a viral particle comprising the fusion RNA of any one of embodiments 98-107, the polynucleotide of embodiment 108, or the vector of any one of embodiments 109-112.
[0392] Embodiment 114 is a cell comprising the fusion RNA of any one of embodiments 98-107, the polynucleotide of embodiment 108, the vector of any one of embodiments 109-112, or the viral particle of embodiment 113.
[0393] Embodiment 115 is the cell of embodiment 114, wherein the cell is a eukaryotic cell.
[0394] Embodiment 116 is the cell of embodiment 114, wherein the cell is a prokaryotic cell.
[0395] Embodiment 117 is the cell of embodiment 115, wherein the cell is a mammalian cell, optionally a bovine, murine, feline, equine, porcine, canine, simian, or human cell.
[0396] Embodiment 118 is a system for post-transcriptional gene regulation, the system comprising:
   [0397] (i) a fusion RNA according to any one of embodiments 98-107; and
   [0398] (ii) guide nucleotide sequence-programmable RNA binding protein,
      [0399] wherein the fusion RNA comprises a sequence complementary to a target mRNA.
[0400] Embodiment 119 is a system for increasing translation of a target mRNA, the system comprising:
   [0401] (i) a fusion RNA according to any one of embodiments 98-107; and
   [0402] (ii) guide nucleotide sequence-programmable RNA binding protein,
      [0403] wherein the fusion RNA comprises a sequence complementary to a target mRNA.
[0404] Embodiment 120 is the system of embodiment 118 or 119, further comprising a PAMmer.
[0405] Embodiment 121 is the system of embodiment 118 or 119, wherein the target mRNA does not comprise a PAM sequence or its complement.
[0406] Embodiment 122 is the system of any one of embodiments 118-121, wherein the guide nucleotide-sequence programmable RNA binding protein is selected from: Cas9, modified Cas9, Cas13a, Cas13b, CasRX/Cas13d, and a biological equivalent of each thereof.
[0407] Embodiment 123 is the system of any one of embodiments 118-122, wherein the guide nucleotide sequence-programmable RNA binding protein is selected from: Steptococcus pyogenes Cas9 (spCas9), Staphilococcus aureus Cas9 (saCas9), Francisella novicida Cas9 (FnCas9), Neisseria meningitidis Cas9 (nmCas9), Streptococcus thermophilus 1 Cas9 (St1Cas9), Streptococcus thermophilus 3 Cas9 (St3Cas9), and Brevibacillus laterosporus Cas9 (BlatCas9).
[0408] Embodiment 124 is the system of any one of embodiments 118-123, wherein the guide nucleotide sequence-programmable RNA binding protein is nuclease inactive.
[0409] Embodiment 125 is a method for post-transcriptionally increasing gene expression, the method comprising contacting a target mRNA with a fusion RNA according to any one of embodiments 98-107 and a guide nucleotide sequence-programmable RNA binding protein.
[0410] Embodiment 126 is a method for post-transcriptionally decreasing gene expression, the method comprising contacting a target mRNA with a fusion RNA according to any one of embodiments 98-107 and a guide nucleotide sequence-programmable RNA binding protein.
[0411] Embodiment 127 is the method of embodiment 125 or 126, further comprising contacting the guide nucleotide sequence-programmable RNA binding protein with a PAMmer.
[0412] Embodiment 128 is the method of embodiment 125 or 126, wherein the target mRNA does not comprise a PAM sequence.
[0413] Embodiment 129 is the method of any one of embodiments 125-128, wherein the guide nucleotide-sequence programmable RNA binding protein is selected from: Cas9, modified Cas9, Cas13a, Cas13b, CasRX/Cas13d, and a biological equivalent of each thereof.
[0414] Embodiment 130 is the method of any one of embodiments 125-129, wherein the guide nucleotide sequence-programmable RNA binding protein is selected from: Steptococcus pyogenes Cas9 (spCas9), Staphilococcus aureus Cas9 (saCas9), Francisella novicida Cas9 (FnCas9), Neisseria meningitidis Cas9 (nmCas9), Streptococcus thermophilus 1 Cas9 (St1Cas9), Streptococcus thermophilus 3 Cas9 (St3Cas9), and Brevibacillus laterosporus Cas9 (BlatCas9).
[0415] Embodiment 131 is the method of any one of embodiments 125-130, wherein the guide nucleotide sequence-programmable RNA binding protein is nuclease inactive.
[0416] Embodiment 132 is the method of any one of embodiments 125-131, wherein the target mRNA is in a cell.
[0417] Embodiment 133 is the method of embodiment 132, wherein the cell is a eukaryotic cell.
[0418] Embodiment 134 is the method of embodiment 132, wherein the cell is a prokaryotic cell.
[0419] Embodiment 135 is the method of embodiment 133, wherein the eukaryotic cell is a mammalian cell, optionally a bovine, murine, feline, equine, porcine, canine, simian, or human cell.
[0420] Embodiment 136 is the method of any one of embodiments 125-135, wherein the cell is in a subject.
[0421] Embodiment 137 is a method for treating a disease or condition in a subject in need thereof, the method comprising administering to the subject:
   [0422] (i) a guide nucleotide sequence-programmable RNA binding protein; and
   [0423] (ii) the fusion RNA of any one of embodiments 98-107, the polynucleotide of embodiment 108, the vector of any one of embodiments 109-112, or the viral particle of embodiment 113, wherein the fusion RNA is complementary to a target mRNA in the subject,
   [0424] thereby increasing translation of a target mRNA in the subject.
[0425] Embodiment 138 is the method of embodiment 137, wherein the subject is a human.
[0426] Embodiment 139 is the method of embodiment 137 or 138, further comprising administering to the subject one or more of: (i) tracrRNA and (ii) a PAMmer.
[0427] Embodiment 140 is a kit comprising one or more of: fusion RNA of any one of embodiments 98-107, the polynucleotide of embodiment 108, the vector of any one of embodiments 109-112, or the viral particle of embodiment 113, and optionally instructions for use.
[0428] Embodiment 141 is the kit embodiment 140, further comprising one or more nucleic acids selected from:
   [0429] (i) PAMmer;
   [0430] (ii) a tracrRNA; and
   [0431] (iii) a vector for expressing the nucleic acid of (i) or (ii).
[0432] Embodiment 142 is the kit embodiment 140 or 141, further comprising a guide nucleotide sequence-programmable RNA binding protein.
[0433] Embodiment 143 is a fusion protein comprising:
   [0434] (iii) a guide nucleotide sequence-programmable RNA binding protein; and
   [0435] (iv) a ubiquitin-associated protein 2-like (UBAP2L) protein.
[0436] Embodiment 144 is the fusion protein of embodiment 143, wherein the guide nucleotide sequence-programmable RNA binding protein is selected from: Cas9, modified Cas9, Cas13a, Cas13b, CasRX/Cas13d, and a biological equivalent of each thereof.
[0437] Embodiment 145 is the fusion protein of embodiment 144, wherein the guide nucleotide sequence-programmable RNA binding protein is selected from: Steptococcus pyogenes Cas9 (spCas9), Staphylococcus aureus Cas9 (saCas9), Francisella novicida Cas9 (FnCas9), Neisseria meningitidis Cas9 (nmCas9), Streptococcus thermophilus 1 Cas9 (St1Cas9), Streptococcus thermophilus 3 Cas9 (St3Cas9), and Brevibacillus laterosporus Cas9 (BlatCas9).
[0438] Embodiment 146 is the fusion protein of embodiment 144 or 145, wherein the guide nucleotide sequence-programmable RNA binding protein is nuclease inactive.
[0439] Embodiment 147 is the fusion protein of any one of embodiments 143-146, further comprising a linker.
[0440] Embodiment 148 is the fusion protein of embodiment 147, wherein the linker is a peptide linker.
[0441] Embodiment 149 is the fusion protein of embodiment 148, wherein the peptide linker comprises one or more repeats of the tri-peptide GGS.
[0442] Embodiment 150 is the fusion protein of embodiment 147, wherein the linker is a non-peptide linker.
[0443] Embodiment 151 is the fusion protein of embodiment 150, wherein the non-peptide linker comprises polyethylene glycol (PEG), polypropylene glycol (PPG), co-poly(ethylene/propylene) glycol, polyoxyethylene (POE), polyurethane, polyphosphazene, polysaccharides, dextran, polyvinyl alcohol, polyvinylpyrrolidones, polyvinyl ethyl ether, polyacryl amide, polyacrylate, polycyanoacrylates, lipid polymers, chitins, hyaluronic acid, heparin, or an alkyl linker.
[0444] Embodiment 152 is the fusion protein of any one of embodiments 147-151, wherein the fusion protein comprises the structure NH₂-[UBAP2L]-[linker]-[guide nucleotide sequence-programmable RNA binding protein]-COOH.
[0445] Embodiment 153 is the fusion protein of any one of embodiments 147-151, wherein the fusion protein comprises the structure NH₂-[guide nucleotide sequence-programmable RNA binding protein]-[linker]-[UBAP2L]-COOH.
[0446] Embodiment 154 is the fusion protein of any one of embodiments 143-153, wherein the guide nucleotide sequence-programmable RNA binding protein is bound to a guide RNA (gRNA), a crisprRNA (crRNA), or a trans-activating crRNA (tracrRNA).
[0447] Embodiment 155 is the fusion protein of any one of embodiments 143-154, wherein the UBAP2L protein is encoded by a polynucleotide having a sequence comprising all or part of a sequence selected from SEQ ID NO: 64, SEQ ID NO: 65, SEQ ID NO: 66, SEQ ID NO: 67, and a biological equivalent of each thereof.
[0448] Embodiment 156 is the fusion protein of any one of embodiments 34-46, wherein the UBAP2L protein has an amino acid sequence comprising all or part of a sequence selected from SEQ ID NO: 68, SEQ ID NO: 69, SEQ ID NO: 70, SEQ ID NO: 71, and a biological equivalent of each thereof.
[0449] Embodiment 157 is the fusion protein of any one of embodiments 143-156, wherein one or more kinase phosphorylation domains of the UBAP2L is mutated.
[0450] Embodiment 158 is the fusion protein of embodiment 157, wherein the mutated UBAP2L is constituitively active.

### EXAMPLES

[0451] The following examples are non-limiting and illustrative procedures which can be used in various instances in carrying the disclosure into effect.

[0452] Exemplary polynucleotide and polypeptide sequences used in the examples described herein are listed in Table 3.

TABLE 3

| V5 Tag | GKPIPNPLLGLDST (SEQ ID NO: 73) |
|---|---|
| dCas9 | MDKKYSIGLAIGTNSVGWAVITDEYKVPSKKFKVLGNTDRHSIKK |
| | NLIGALLFDSGETAEATRLKRTARRRYTRRKNRICYLQEIFSNEM |
| | AKVDDSFFHRLEESFLVEEDKKHERHPIFGNIVDEVAYHEKYPTI |
| | YHLRKKLVDSTDKADLRLIYLALAHMIKFRGHFLIEGDLNPDNSD |
| | VDKLFIQLVQTYNQLFEENPINASGVDAKAILSARLSKSRRLENL |
| | IAQLPGEKKNGLFGNLIALSLGLTPNFKSNFDLAEDAKLQLSKDT |
| | YDDDLDNLLAQIGDQYADLFLAAKNLSDAILLSDILRVNTEITKA |
| | PLSASMIKRYDEHHQDLTLLKALVRQQLPEKYKEIFFDQSKNGYA |
| | GYIDGGASQEEFYKFIKPILEKMDGTEELLVKLNREDLLRKQRTF |
| | DNGSIPHQIHLGELHAILRRQEDFYPFLKDNREKIEKILTFRIPY |
| | YVGPLARGNSRFAWMTRKSEETITPWNFEEVVDKGASAQSFIERM |
| | TNFDKNLPNEKVLPKHSLLYEYFTVYNELTKVKYVTEGMRKPAFL |
| | SGEQKKAIVDLLFKTNRKVTVKQLKEDYFKKIECFDSVEISGVED |
| | RFNASLGTYHDLLKIIKDKDFLDNEENEDILEDIVLTLTLFEDRE |
| | MIEERLKTYAHLFDDKVMKQLKRRRYTGWGRLSRKLINGIRDKQS |
| | GKTILDFLKSDGFANRNFMQLIHDDSLTFKEDIQKAQVSGQGDSL |
| | HEHIANLAGSPAIKKGILQTVKVVDELVKVMGRHKPENIVIEMAR |
| | ENQTTQKGQKNSRERMKRIEEGIKELGSQILKEHPVENTQLQNEK |
| | LYLYYLQNGRDMYVDQELDINRLSDYDVDAIVPQSFLKDDSIDNK |
| | VLTRSDKNRGKSDNVPSEEVVKKMKNYWRQLLNAKLITQRKFDNL |
| | TKAERGGLSELDKAGFIKRQLVETRQITKHVAQILDSRMNTKYDE |
| | NDKLIREVKVITLKSKLVSDFRKDFQFYKVREINNYHHAHDAYLN |
| | AVVGTALIKKYPKLESEFVYGDYKVYDVRKMIAKSEQEIGKATAK |
| | YFFYSNIMNFFKTEITLANGEIRKRPLIETNGETGEIVWDKGRDF |
| | ATVRKVLSMPQVNIVKKTEVQTGGFSKESILPKRNSDKLIARKKD |
| | WDPKKYGGFDSPTVAYSVLVVAKVEKGKSKKLKSVKELLGITIME |
| | RSSFEKNPIDFLEAKGYKEVKKDLIIKLPKYSLFELENGRKRMLA |
| | SAGELQKGNELALPSKYVNFLYLASHYEKLKGSPEDNEQKQLFVE |
| | QHKHYLDEIIEQISEFSKRVILADANLDKVLSAYNKHRDKPIREQ |
| | AENIIHLFTLTNLGAPAAFKYFDTTIDRKRYTSTKEVLDATLIHQ |
| | SITGLYETRIDLSQLGGD(SEQ ID NO: 74) |
| NLS | MVSKGGSSDDEATADSQHAAPPKKKRKVGDPRVPVAT (SEQ ID |
| | NO: 75) |
| PB-TRE-V5- | ACTCTTCCTTTTTCAATATTATTGAAGCATTTATCAGGGTTATTG |
| rCas9- | TCTCATGAGCGGATACATATTTGAATGTATTTAGAAAAATAAACA |
| mut (EIF4E) EF | AATAGGGGTTCCGCGCACATTTCCCCGAAAAGTGCCACCTAAATT |
| NLS-Turq | GTAAGCGTTAATATTTTGTTAAAATTCGCGTTAAATTTTTGTTAA |
| | ATCAGCTCATTTTTTAACCAATAGGCCGAAATCGGCAAAATCCCT |
| | TATAAATCAAAAGAATAGACCGAGATAGGGTTGAGTGTTGTTCCA |
| | GTTTGGAACAAGAGTCCACTATTAAAGAACGTGGACTCCAACGTC |
| | AAAGGGCGAAAAACCGTCTATCAGGGCGATGGCCCACTACGTGAA |
| | CCATCACCCTAATCAAGTTTTTTGGGGTCGAGGTGCCGTAAAGCA |
| | CTAAATCGGAACCCTAAAGGGAGCCCCCGATTTAGAGCTTGACGG |
| | GGAAAGCCGGCGAACGTGGCGAGAAAGGAAGGGAAGAAAGCGAAA |
| | GGAGCGGGCGCTAGGGCGCTGGCAAGTGTAGCGGTCACGCTGCGC |
| | GTAACCACCACACCCGCCGCGCTTAATGCGCCGCTACAGGGCGCG |
| | TCCCATTCGCCATTCAGGCTGCGCAACTGTTGGGAAGGGCGATCG |
| | GTGCGGGCCTCTTCGCTATTACGCCAGCTGGCGAAAGGGGGATGT |
| | GCTGCAAGGCGATTAAGTTGGGTAACGCCAGGGTTTTCCCAGTCA |
| | CGACGTTGTAAAACGACGGCCAGTGAGCGCGCCTCGTTCATTCAC |
| | GTTTTTGAACCCGTGGAGGACGGGCAGACTCGCGGTGCAAATGTG |
| | TTTTACAGCGTGATGGAGCAGATGAAGATGCTCGACACGCTGCAG |
| | AACACGCAGCTAGATTAACCCTAGAAAGATAATCATATTGTGACG |
| | TACGTTAAAGATAATCATGTGTAAAATTGACGCATGTGTTTTATC |
| | GGTCTGTATATCGAGGTTTATTTATTAATTTGAATAGATATTAAG |
| | TTTTATTATATTTACACTTACATACTAATAATAAATTCAACAAAC |
| | AATTTATTTATGTTTATTTATTTATTAAAAAAAACAAAAACTCAA |
| | AATTTCTTCTATAAAGTAACAAAACTTTTATGAGGGACAGCCCCC |
| | CCCCAAAGCCCCCAGGGATGTAATTACGTCCCTCCCCCGCTAGGG |
| | GGCAGCAGCGAGCCGCCCGGGGCTCCGCTCCGGTCCGGCGCTCCC |
| | CCCGCATCCCCGAGCCGGCAGCGTGCGGGGACAGCCCGGGCACGG |
| | GGAAGGTGGCACGGGATCGCTTTCCTCTGAACGCTTCTCGCTGCT |
| | CTTTGAGCCTGCAGACACCTGGGGGGATACGGGGAAAAGGCCTCC |
| | ACGGCCACTAGTTCTACCGGGTAGGGGAGGCGCTTTTCCCAAGGC |
| | AGTCTGGAGCATGCGCTTTAGCAGCCCCGCTGGGCACTTGGCGCT |
| | ACACAAGTGGCCTCTGGCCTCGCACACATTCCACATCCACCGGTA |
| | GGCGCCAACCGGCTCCGTTCTTTGGTGGCCCCTTCGCGCCACCTT |
| | CTACTCCTCCCCTAGTCAGGAAGTTCCCCCCCGCCCCGCAGCTCG |
| | CGTCGTGCAGGACGTGACAAATGGAAGTAGCACGTCTCATTAGTC |
| | TCGTGCAGATGGACAGCACCGCTGAGCAATGGAAGCGGGTAGGCC |
| | TTTGGGGCAGCGGCCAATAGCAGCTTTGCTCCTTCGCTTTCTGGG |
| | CTCAGAGGCTGGGAAGGGGTGGGTCCGGGGGCGGGCTCAGGGGCG |
| | GGCTCAGGGGCGGGGCGGGCGCCCGAAGGTCCTCCGGAGGCCCGG |
| | CATTCTGCACGCTTCAAAAGCGCACGTCTGCCGCGCTGTTCTCCT |
| | CTTCCTCATCTCCGGGCCTTTCGACCTGCAGGTTAATTAAATGGG |
| | TAAGCCTATCCCTAACCCTCTCCTCGGTCTCGATTCTACGGCTAG |
| | CATGGACAAGAAGTACAGCATCGGCCTGGCCATCGGCACCAACTC |
| | TGTGGGCTGGGCCGTGATCACCGACGAGTACAAGGTGCCCAGCAA |
| | GAAATTCAAGGTGCTGGGCAACACCGACCGGCACAGCATCAAGAA |
| | GAACCTGATCGGCGCCCTGCTGTTCGACAGCGGAGAAACAGCCGA |
| | GGCCACCCGGCTGAAGAGAACCGCCAGAAGAAGATACACCAGACG |
| | GAAGAACCGGATCTGCTATCTGCAAGAGATCTTCAGCAACGAGAT |
| | GGCCAAGGTGGACGACAGCTTCTTCCACAGACTGGAAGAGTCCTT |
| | CCTGGTGGAAGAGGATAAGAAGCACGAGCGGCACCCCATCTTCGG |
| | CAACATCGTGGACGAGGTGGCCTACCACGAGAAGTACCCCACCAT |
| | CTACCACCTGAGAAAGAAACTGGTGGACAGCACCGACAAGGCCGA |
| | CCTGCGGCTGATCTATCTGGCCCTGGCCCACATGATCAAGTTCCG |
| | GGGCCACTTCCTGATCGAGGGCGACCTGAACCCCGACAACAGCGA |
| | CGTGGACAAGCTGTTCATCCAGCTGGTGCAGACCTACAACCAGCT |
| | GTTCGAGGAAAACCCCATCAACGCCAGCGGCGTGGACGCCAAGGC |
| | CATCCTGTCTGCCAGACTGAGCAAGAGCAGACGGCTGGAAAATCT |
| | GATCGCCCAGCTGCCCGGCGAGAAGAAGAATGGCCTGTTCGGCAA |
| | CCTGATTGCCCTGAGCCTGGGCCTGACCCCCAACTTCAAGAGCAA |
| | CTTCGACCTGGCCGAGGATGCCAAACTGCAGCTGAGCAAGGACAC |
| | CTACGACGACGACCTGGACAACCTGCTGGCCCAGATCGGCGACCA |
| | GTACGCCGACCTGTTTCTGGCCGCCAAGAACCTGTCCGACGCCAT |
| | CCTGCTGAGCGACATCCTGAGAGTGAACACCGAGATCACCAAGGC |
| | CCCCCTGAGCGCCTCTATGATCAAGAGATACGACGAGCACCACCA |
| | GGACCTGACCCTGCTGAAAGCTCTCGTGCGGCAGCAGCTGCCTGA |
| | GAAGTACAAAGAGATTTTCTTCGACCAGAGCAAGAACGGCTACGC |
| | CGGCTACATCGATGGCGGAGCCAGCCAGGAAGAGTTCTACAAGTT |
| | CATCAAGCCCATCCTGGAAAAGATGGACGGCACCGAGGAACTGCT |
| | CGTGAAGCTGAACAGAGAGGACCTGCTGCGGAAGCAGCGGACCTT |
| | CGACAACGGCAGCATCCCCCACCAGATCCACCTGGGAGAGCTGCA |
| | CGCCATTCTGCGGCGGCAGGAAGATTTTTACCCATTCCTGAAGGA |
| | CAACCGGGAAAAGATCGAGAAGATCCTGACCTTCCGCATCCCCTA |
| | CTACGTGGGCCCTCTGGCCAGGGGAAACAGCAGATTCGCCTGGAT |
| | GACCAGAAAGAGCGAGGAAACCATCACCCCCTGGAACTTCGAGGA |
| | AGTGGTGGACAAGGGCGCCAGCGCCCAGAGCTTCATCGAGCGGAT |
| | GACCAACTTCGATAAGAACCTGCCCAACGAGAAGGTGCTGCCCAA |
| | GCACAGCCTGCTGTACGAGTACTTCACCGTGTACAACGAGCTGAC |
| | CAAAGTGAAATACGTGACCGAGGGAATGAGAAAGCCCGCCTTCCT |
| | GAGCGGCGAGCAGAAAAAAGCCATCGTGGACCTGCTGTTCAAGAC |
| | CAACCGGAAAGTGACCGTGAAGCAGCTGAAAGAGGACTACTTCAA |
| | GAAAATCGAGTGCTTCGACTCCGTGGAAATCTCCGGCGTGGAAGA |
| | TCGGTTCAACGCCTCCCTGGGCACATACCACGATCTGCTGAAAAT |
| | TATCAAGGACAAGGACTTCCTGGACAATGAGGAAAACGAGGACAT |
| | TCTGGAAGATATCGTGCTGACCCTGACACTGTTTGAGGACAGAGA |
| | GATGATCGAGGAACGGCTGAAAACCTATGCCCACCTGTTCGACGA |
| | CAAAGTGATGAAGCAGCTGAAGCGGCGGAGATACACCGGCTGGGG |
| | CAGGCTGAGCCGGAAGCTGATCAACGGCATCCGGGACAAGCAGTC |
| | CGGCAAGACAATCCTGGATTTCCTGAAGTCCGACGGCTTCGCCAA |
| | CAGAAACTTCATGCAGCTGATCCACGACGACAGCCTGACCTTTAA |
| | AGAGGACATCCAGAAAGCCCAGGTGTCCGGCCAGGGCGATAGCCT |
| | GCACGAGCACATTGCCAATCTGGCCGGCAGCCCCGCCATTAAGAA |
| | GGGCATCCTGCAGACAGTGAAGGTGGTGGACGAGCTCGTGAAAGT |
| | GATGGGCCGGCACAAGCCCGAGAACATCGTGATCGAAATGGCCAG |
| | AGAGAACCAGACCACCCAGAAGGGACAGAAGAACAGCCGCGAGAG |
| | AATGAAGCGGATCGAAGAGGGCATCAAAGAGCTGGGCAGCCAGAT |
| | CCTGAAAGAACACCCCGTGGAAAACACCCAGCTGCAGAACGAGAA |
| | GCTGTACCTGTACTACCTGCAGAATGGGCGGGATATGTACGTGGA |
| | CCAGGAACTGGACATCAACCGGCTGTCCGACTACGATGTGGACGC |
| | TATCGTGCCTCAGAGCTTTCTGAAGGACGACTCCATCGATAACAA |
| | AGTGCTGACTCGGAGCGACAAGAACCGGGGCAAGAGCGACAACGT |
| | GCCCTCCGAAGAGGTCGTGAAGAAGATGAAGAACTACTGGCGCCA |
| | GCTGCTGAATGCCAAGCTGATTACCCAGAGGAAGTTCGACAATCT |
| | GACCAAGGCCGAGAGAGGCGGCCTGAGCGAACTGGATAAGGCCGG |
| | CTTCATCAAGAGACAGCTGGTGGAAACCCGGCAGATCACAAAGCA |
| | CGTGGCACAGATCCTGGACTCCCGGATGAACACTAAGTACGACGA |
| | GAACGACAAACTGATCCGGGAAGTGAAAGTGATCACCCTGAAGTC |
| | CAAGCTGGTGTCCGATTTCCGGAAGGATTTCCAGTTTTACAAAGT |
| | GCGCGAGATCAACAACTACCACCACGCCCACGACGCCTACCTGAA |
| | CGCCGTCGTGGGAACCGCCCTGATCAAAAAGTACCCTAAGCTGGA |
| | AAGCGAGTTCGTGTACGGCGACTACAAGGTGTACGACGTGCGGAA |
| | GATGATCGCCAAGAGCGAGCAGGAAATCGGCAAGGCTACCGCCAA |
| | GTACTTCTTCTACAGCAACATCATGAACTTTTTCAAGACCGAGAT |
| | TACCCTGGCCAACGGCGAGATCCGGAAGCGGCCTCTGATCGAGAC |
| | AAACGGCGAAACAGGCGAGATCGTGTGGGATAAGGGCCGGGACTT |
| | TGCCACCGTGCGGAAAGTGCTGTCTATGCCCCAAGTGAATATCGT |
| | GAAAAAGACCGAGGTGCAGACAGGCGGCTTCAGCAAAGAGTCTAT |
| | CCTGCCCAAGAGGAACAGCGACAAGCTGATCGCCAGAAAGAAGGA |
| | CTGGGACCCTAAGAAGTACGGCGGCTTCGACAGCCCCACCGTGGC |
| | CTATTCTGTGCTGGTGGTGGCCAAAGTGGAAAAGGGCAAGTCCAA |
| | GAAACTGAAGAGTGTGAAAGAGCTGCTGGGGATCACCATCATGGA |
| | AAGAAGCAGCTTCGAGAAGAATCCCATCGACTTTCTGGAAGCCAA |
| | GGGCTACAAAGAAGTGAAAAAGGACCTGATCATCAAGCTGCCTAA |
| | GTACTCCCTGTTCGAGCTGGAAAACGGCCGGAAGAGAATGCTGGC |
| | CTCTGCCGGCGAACTGCAGAAGGGAAACGAACTGGCCCTGCCCTC |
| | CAAATATGTGAACTTCCTGTACCTGGCCAGCCACTATGAGAAGCT |
| | GAAGGGCTCCCCCGAGGATAATGAGCAGAAACAGCTGTTTGTGGA |
| | ACAGCACAAACACTACCTGGACGAGATCATCGAGCAGATCAGCGA |
| | GTTCTCCAAGAGAGTGATCCTGGCCGACGCTAATCTGGACAAGGT |
| | GCTGAGCGCCTACAACAAGCACAGAGACAAGCCTATCAGAGAGCA |
| | GGCCGAGAATATCATCCACCTGTTTACCCTGACCAATCTGGGAGC |
| | CCCTGCCGCCTTCAAGTACTTTGACACCACCATCGACCGGAAGAG |
| | GTACACCAGCACCAAAGAGGTGCTGGACGCCACCCTGATCCACCA |
| | GAGCATCACCGGCCTGTACGAGACACGGATCGACCTGTCTCAGCT |
| | GGGAGGCGACCTCGAGGGCGGATCCGGTGGTTCCGGAGGAGCTGT |
| | CGACATGGCGACTGTCGAACCGGAAACCACCCCTACTCCTAATCC |
| | CCCGACTACAGAAGAGGAGAAAACGGAATCTAATCAGGAGGTTGC |
| | TAACCCAGAACACTATATTAAACGGCCCCTACAGAACAGATGGGC |
| | ACTCTGGTTTTTTAAAAATGATAAAAGCAAAACTTGGCAAGCAAA |
| | CCTGCGGCTGATCTCCAAGTTTGATACTGCTGAAGACTTTTTTGC |
| | TCTGTACAACCATATCCAGTTGTCTAGTAATTTAATGCCTGGCTG |
| | TGACTACTCACTTTTTAAGGATGGTATTGAGCCTATGTGGGAAGA |
| | TGAGAAAAACAAACGGGGAGGACGATGGCTAATTACATTGAACAA |
| | ACAGCAGAGACGAAGTGACCTCGATCGCTTTTGGCTAGAGACACT |
| | TCTGTGCCTTATTGGAGAATCTTTTGATGACTACAGTGATGATGT |
| | ATGTGGCGCTGTTGTTAATGTTAGAGCTAAAGGTGATAAGATAGC |
| | AATATGGACTACTGAATGTGAAAACAGAGAAGCTGTTACACATAT |
| | AGGGAGGGTATACAAGGAAAGGTTAGGACTTCCTCCAAAGATAGT |
| | GATTGGTTATCAGTCCCACGCAGACACAGCTACTAAGAGCGGCGA |
| | CACCACTAAAAATAGGTTTGTTGTTTCTAGACTTAAGTAAGCCTC |
| | GACTGTGCCTTCTAGTTGCCAGCCATCTGTTGTTTGCCCCTCCCC |
| | CGTGCCTTCCTTGACCCTGGAAGGTGCCACTCCCACTGTCCTTTC |
| | CTAATAAAATGAGGAAATTGCATCGCATTGTCTGAGTAGGTGTCA |
| | TTCTATTCTGGGGGGTGGGGTGGGGCAGGACAGCAAGGGGGAGGA |
| | TTGGGAAGACAATAGCAGGCATGCTGGGGAGTGCCCGTCAGTGGG |
| | CAGAGCGCACATCGCCCACAGTCCCCGAGAAGTTGGGGGGAGGGG |
| | TCGGCAATTGAACGGGTGCCTAGAGAAGGTGGCGCGGGGTAAACT |
| | GGGAAAGTGATGTCGTGTACTGGCTCCGCCTTTTTCCCGAGGGTG |
| | GGGGAGAACCGTATATAAGTGCAGTAGTCGCCGTGAACGTTCTTT |
| | TTCGCAACGGGTTTGCCGCCAGAACACAGATGGTCTCTAAAGGAG |
| | GTTCGTCCGACGACGAAGCAACAGCGGACTCGCAGCACGCCGCAC |
| | CTCCTAAGAAGAAAAGGAAGGTAGGGGATCCCCGGGTACCGGTCG |
| | CCACCATGGTGAGCAAGGGCGAGGAGCTGTTCACCGGGGTGGTGC |
| | CCATCCTGGTCGAGCTGGACGGCGACGTAAACGGCCACAAGTTCA |
| | GCGTGTCCGGCGAGGGCGAGGGCGATGCCACCTACGGCAAGCTGA |
| | CCCTGAAGTTCATCTGCACCACCGGCAAGCTGCCCGTGCCCTGGC |
| | CCACCCTCGTGACCACCCTGTCCTGGGGCGTGCAGTGCTTCGCCC |
| | GCTACCCCGACCACATGAAGCAGCACGACTTCTTCAAGTCCGCCA |
| | TGCCCGAAGGCTACGTCCAGGAGCGCACCATCTTCTTCAAGGACG |
| | ACGGCAACTACAAGACCCGCGCCGAGGTGAAGTTCGAGGGCGACA |
| | CCCTGGTGAACCGCATCGAGCTGAAGGGCATCGACTTCAAGGAGG |
| | ACGGCAACATCCTGGGGCACAAGCTGGAGTACAACTACTTTAGCG |
| | ACAACGTCTATATCACCGCCGACAAGCAGAAGAACGGCATCAAGG |
| | CCAACTTCAAGATCCGCCACAACATCGAGGACGGCGGCGTGCAGC |
| | TCGCCGACCACTACCAGCAGAACACCCCCATCGGCGACGGCCCCG |
| | TGCTGCTGCCCGACAACCACTACCTGAGCACCCAGTCCAAGCTGA |
| | GCAAAGACCCCAACGAGAAGCGCGATCACATGGTCCTGCTGGAGT |
| | TCGTGACCGCCGCCGGGATCACTCTCGGCATGGACGAGCTGTACA |
| | AGTAAAATCAACCTCTGGATTACAAAATTTGTGAAAGATTGACTG |
| | GTATTCTTAACTATGTTGCTCCTTTTACGCTATGTGGATACGCTG |
| | CTTTAATGCCTTTGTATCATGTTAACTAAACTTGTTTATTGCAGC |
| | TTATAATGGTTACAAATAAAGCAATAGCATCACAAATTTCACAAA |
| | TAAAGCATTTTTTTCACTGCATTCTAGTTGTGGTTTGTCCAAACT |
| | CATCAATGTATCTTATCATGTCTGGAATTGACTCAAATGATGTCA |
| | ATTAGTCTATCAGAAGCTCATCTGGTCTCCCTTCCGGGGGACAAG |
| | ACATCCCTGTTTAATATTTAAACAGCAGTGTTCCCAAACTGGGTT |
| | CTTATATCCCTTGCTCTGGTCAACCAGGTTGCAGGGTTTCCTGTC |
| | CTCACAGGAACGAAGTCCCTAAAGAAACAGTGGCAGCCAGGTTTA |
| | GCCCCGGAATTGACTGGATTCCTTTTTTAGGGCCCATTGGTATGG |
| | CTTTTTCCCCGTATCCCCCCAGGTGTCTGCAGGCTCAAAGAGCAG |
| | CGAGAAGCGTTCAGAGGAAAGCGATCCCGTGCCACCTTCCCCGTG |
| | CCCGGGCTGTCCCCGCACGCTGCCGGCTCGGGGATGCGGGGGGAG |
| | CGCCGGACCGGAGCGGAGCCCCGGGCGGCTCGCTGCTGCCCCCTA |
| | GCGGGGGAGGGACGTAATTACATCCCTGGGGGCTTTGGGGGGGGG |
| | CTGTCCCTGATATCTATAACAAGAAAATATATATATAATAAGTTA |
| | TCACGTAAGTAGAACATGAAATAACAATATAATTATCGTATGAGT |
| | TAAATCTTAAAAGTCACGTAAAAGATAATCATGCGTCATTTTGAC |
| | TCACGCGGTCGTTATAGTTCAAAATCAGTGACACTTACCGCATTG |
| | ACAAGCACGCCTCACGGGAGCTCCAAGCGGCGACTGAGATGTCCT |
| | AAATGCACAGCGACGGATTCGCGCTATTTAGAAAGAGAGAGCAAT |
| | ATTTCAAGAATGCATGCGTCAATTTTACGCAGACTATCTTTCTAG |
| | GGTTAATCTAGCTGCATCAGGATCATATCGTCGGGTCTTTTTTCC |
| | GGCTCAGTCATCGCCCAAGCTGGCGCTATCTGGGCATCGGGGAGG |
| | AAGAAGCCCGTGCCTTTTCCCGCGAGGTTGAAGCGGCATGGAAAG |
| | AGTTTGCCGAGGATGACTGCTGCTGCATTGACGTTGAGCGAAAAC |
| | GCACGTTTACCATGATGATTCGGGAAGGTGTGGCCATGCACGCCT |
| | TTAACGGTGAACTGTTCGTTCAGGCCACCTGGGATACCAGTTCGT |
| | CGCGGCTTTTCCGGACACAGTTCCGGATGGTCAGCCCGAAGCGCA |
| | TCAGCAACCCGAACAATACCGGCGACAGCCGGAACTGCCGTGCCG |
| | GTGTGCAGATTAATGACAGCGGTGCGGCGCTGGGATATTACGTCA |
| | GCGAGGACGGGTATCCTGGCTGGATGCCGCAGAAATGGACATGGA |
| | TACCCCGTGAGTTACCCGGCGGGCGCGCTTGGCGTAATCATGGTC |
| | ATAGCTGTTTCCTGTGTGAAATTGTTATCCGCTCACAATTCCACA |
| | CAACATACGAGCCGGAAGCATAAAGTGTAAAGCCTGGGGTGCCTA |
| | ATGAGTGAGCTAACTCACATTAATTGCGTTGCGCTCACTGCCCGC |
| | TTTCCAGTCGGGAAACCTGTCGTGCCAGCTGCATTAATGAATCGG |
| | CCAACGCGCGGGGAGAGGCGGTTTGCGTATTGGGCGCTCTTCCGC |
| | TTCCTCGCTCACTGACTCGCTGCGCTCGGTCGTTCGGCTGCGGCG |
| | AGCGGTATCAGCTCACTCAAAGGCGGTAATACGGTTATCCACAGA |
| | ATCAGGGGATAACGCAGGAAAGAACATGTGAGCAAAAGGCCAGCA |
| | AAAGGCCAGGAACCGTAAAAAGGCCGCGTTGCTGGCGTTTTTCCA |
| | TAGGCTCCGCCCCCCTGACGAGCATCACAAAAATCGACGCTCAAG |
| | TCAGAGGTGGCGAAACCCGACAGGACTATAAAGATACCAGGCGTT |
| | TCCCCCTGGAAGCTCCCTCGTGCGCTCTCCTGTTCCGACCCTGCC |
| | GCTTACCGGATACCTGTCCGCCTTTCTCCCTTCGGGAAGCGTGGC |
| | GCTTTCTCATAGCTCACGCTGTAGGTATCTCAGTTCGGTGTAGGT |
| | CGTTCGCTCCAAGCTGGGCTGTGTGCACGAACCCCCCGTTCAGCC |
| | CGACCGCTGCGCCTTATCCGGTAACTATCGTCTTGAGTCCAACCC |
| | GGTAAGACACGACTTATCGCCACTGGCAGCAGCCACTGGTAACAG |
| | GATTAGCAGAGCGAGGTATGTAGGCGGTGCTACAGAGTTCTTGAA |
| | GTGGTGGCCTAACTACGGCTACACTAGAAGGACAGTATTTGGTAT |
| | CTGCGCTCTGCTGAAGCCAGTTACCTTCGGAAAAAGAGTTGGTAG |
| | CTCTTGATCCGGCAAACAAACCACCGCTGGTAGCGGTGGTTTTTT |
| | TGTTTGCAAGCAGCAGATTACGCGCAGAAAAAAAGGATCTCAAGA |
| | AGATCCTTTGATCTTTTCTACGGGGTCTGACGCTCAGTGGAACGA |
| | AAACTCACGTTAAGGGATTTTGGTCATGAGATTATCAAAAAGGAT |
| | CTTCACCTAGATCCTTTTAAATTAAAAATGAAGTTTTAAATCAAT |
| | CTAAAGTATATATGAGTAAACTTGGTCTGACAGTTACCAATGCTT |
| | AATCAGTGAGGCACCTATCTCAGCGATCTGTCTATTTCGTTCATC |
| | CATAGTTGCCTGACTCCCCGTCGTGTAGATAACTACGATACGGGA |
| | GGGCTTACCATCTGGCCCCAGTGCTGCAATGATACCGCGAGACCC |
| | ACGCTCACCGGCTCCAGATTTATCAGCAATAAACCAGCCAGCCGG |
| | AAGGGCCGAGCGCAGAAGTGGTCCTGCAACTTTATCCGCCTCCAT |
| | CCAGTCTATTAATTGTTGCCGGGAAGCTAGAGTAAGTAGTTCGCC |
| | AGTTAATAGTTTGCGCAACGTTGTTGCCATTGCTACAGGCATCGT |
| | GGTGTCACGCTCGTCGTTTGGTATGGCTTCATTCAGCTCCGGTTC |
| | CCAACGATCAAGGCGAGTTACATGATCCCCCATGTTGTGCAAAAA |
| | AGCGGTTAGCTCCTTCGGTCCTCCGATCGTTGTCAGAAGTAAGTT |
| | GGCCGCAGTGTTATCACTCATGGTTATGGCAGCACTGCATAATTC |
| | TCTTACTGTCATGCCATCCGTAAGATGCTTTTCTGTGACTGGTGA |
| | GTACTCAACCAAGTCATTCTGAGAATAGTGTATGCGGCGACCGAG |
| | TTGCTCTTGCCCGGCGTCAATACGGGATAATACCGCGCCACATAG |
| | CAGAACTTTAAAAGTGCTCATCATTGGAAAACGTTCTTCGGGGCG |
| | AAAACTCTCAAGGATCTTACCGCTGTTGAGATCCAGTTCGATGTA |
| | ACCCACTCGTGCACCCAACTGATCTTCAGCATCTTTTACTTTCAC |
| | CAGCGTTTCTGGGTGAGCAAAAACAGGAAGGCAAAATGCCGCAAA |
| | AAAGGGAATAAGGGCGACACGGAAATGTTGAATACTCAT (SEQ |
| | ID NO: 76) |
| EIF4E-BP1 | MSGGSSCSQTPSAAAAATRRVVLGAGVQLPPGDYSTAPGGTLFST |
| | APGGTRIIYDRKFLMECRNAPVTKAPPRDLPTIPGVTSPSSDEPP |
| | MEASQSHLRNSPEDKRAGGEESQAEMDI (SEQ ID NO: 77) |
| PB-TRE-V5- | ACTCTTCCTTTTTCAATATTATTGAAGCATTTATCAGGGTTATTGTCTCA |
| rCas9-mut (c- | TGAGCGGATACATATTTGAATGTATTTAGAAAAATAAACAAATAGGGGTT |
| 4EBP1-phosMUT) | CCGCGCACATTTCCCCGAAAAGTGCCACCTAAATTGTAAGCGTTAATATT |
| EF1a NLS-Turq | TTGTTAAAATTCGCGTTAAATTTTTGTTAAATCAGCTCATTTTTTAACCA |
| | ATAGGCCGAAATCGGCAAAATCCCTTATAAATCAAAAGAATAGACCGAGA |
| | TAGGGTTGAGTGTTGTTCCAGTTTGGAACAAGAGTCCACTATTAAAGAAC |
| | GTGGACTCCAACGTCAAAGGGCGAAAAACCGTCTATCAGGGCGATGGCCC |
| | ACTACGTGAACCATCACCCTAATCAAGTTTTTTGGGGTCGAGGTGCCGTA |
| | AAGCACTAAATCGGAACCCTAAAGGGAGCCCCCGATTTAGAGCTTGACGG |
| | GGAAAGCCGGCGAACGTGGCGAGAAAGGAAGGGAAGAAAGCGAAAGGAGC |
| | GGGCGCTAGGGCGCTGGCAAGTGTAGCGGTCACGCTGCGCGTAACCACCA |
| | CACCCGCCGCGCTTAATGCGCCGCTACAGGGCGCGTCCCATTCGCCATTC |
| | AGGCTGCGCAACTGTTGGGAAGGGCGATCGGTGCGGGCCTCTTCGCTATT |
| | ACGCCAGCTGGCGAAAGGGGGATGTGCTGCAAGGCGATTAAGTTGGGTAA |
| | CGCCAGGGTTTTCCCAGTCACGACGTTGTAAAACGACGGCCAGTGAGCGC |
| | GCCTCGTTCATTCACGTTTTTGAACCCGTGGAGGACGGGCAGACTCGCGG |
| | TGCAAATGTGTTTTACAGCGTGATGGAGCAGATGAAGATGCTCGACACGC |
| | TGCAGAACACGCAGCTAGATTAACCCTAGAAAGATAATCATATTGTGACG |
| | TACGTTAAAGATAATCATGTGTAAAATTGACGCATGTGTTTTATCGGTCT |
| | GTATATCGAGGTTTATTTATTAATTTGAATAGATATTAAGTTTTATTATA |
| | TTTACACTTACATACTAATAATAAATTCAACAAACAATTTATTTATGTTT |
| | ATTTATTTATTAAAAAAAACAAAAACTCAAAATTTCTTCTATAAAGTAAC |
| | AAAACTTTTATGAGGGACAGCCCCCCCCCAAAGCCCCCAGGGATGTAATT |
| | ACGTCCCTCCCCCGCTAGGGGGCAGCAGCGAGCCGCCCGGGGCTCCGCTC |
| | CGGTCCGGCGCTCCCCCCGCATCCCCGAGCCGGCAGCGTGCGGGGACAGC |
| | CCGGGCACGGGGAAGGTGGCACGGGATCGCTTTCCTCTGAACGCTTCTCG |
| | CTGCTCTTTGAGCCTGCAGACACCTGGGGGGATACGGGGAAAAGGCCTCC |
| | ACGGCCACTAGTTCTACCGGGTAGGGGAGGCGCTTTTCCCAAGGCAGTCT |
| | GGAGCATGCGCTTTAGCAGCCCCGCTGGGCACTTGGCGCTACACAAGTGG |
| | CCTCTGGCCTCGCACACATTCCACATCCACCGGTAGGCGCCAACCGGCTC |
| | CGTTCTTTGGTGGCCCCTTCGCGCCACCTTCTACTCCTCCCCTAGTCAGG |
| | AAGTTCCCCCCCGCCCCGCAGCTCGCGTCGTGCAGGACGTGACAAATGGA |
| | AGTAGCACGTCTCATTAGTCTCGTGCAGATGGACAGCACCGCTGAGCAAT |
| | GGAAGCGGGTAGGCCTTTGGGGCAGCGGCCAATAGCAGCTTTGCTCCTTC |
| | GCTTTCTGGGCTCAGAGGCTGGGAAGGGGTGGGTCCGGGGGCGGGCTCAG |
| | GGGCGGGCTCAGGGGCGGGGCGGGCGCCCGAAGGTCCTCCGGAGGCCCGG |
| | CATTCTGCACGCTTCAAAAGCGCACGTCTGCCGCGCTGTTCTCCTCTTCC |
| | TCATCTCCGGGCCTTTCGACCTGCAGGTTAATTAAATGGGTAAGCCTATC |
| | CCTAACCCTCTCCTCGGTCTCGATTCTACGGCTAGCATGGACAAGAAGTA |
| | CAGCATCGGCCTGGCCATCGGCACCAACTCTGTGGGCTGGGCCGTGATCA |
| | CCGACGAGTACAAGGTGCCCAGCAAGAAATTCAAGGTGCTGGGCAACACC |
| | GACCGGCACAGCATCAAGAAGAACCTGATCGGCGCCCTGCTGTTCGACAG |
| | CGGAGAAACAGCCGAGGCCACCCGGCTGAAGAGAACCGCCAGAAGAAGAT |
| | ACACCAGACGGAAGAACCGGATCTGCTATCTGCAAGAGATCTTCAGCAAC |
| | GAGATGGCCAAGGTGGACGACAGCTTCTTCCACAGACTGGAAGAGTCCTT |
| | CCTGGTGGAAGAGGATAAGAAGCACGAGCGGCACCCCATCTTCGGCAACA |
| | TCGTGGACGAGGTGGCCTACCACGAGAAGTACCCCACCATCTACCACCTG |
| | AGAAAGAAACTGGTGGACAGCACCGACAAGGCCGACCTGCGGCTGATCTA |
| | TCTGGCCCTGGCCCACATGATCAAGTTCCGGGGCCACTTCCTGATCGAGG |
| | GCGACCTGAACCCCGACAACAGCGACGTGGACAAGCTGTTCATCCAGCTG |
| | GTGCAGACCTACAACCAGCTGTTCGAGGAAAACCCCATCAACGCCAGCGG |
| | CGTGGACGCCAAGGCCATCCTGTCTGCCAGACTGAGCAAGAGCAGACGGC |
| | TGGAAAATCTGATCGCCCAGCTGCCCGGCGAGAAGAAGAATGGCCTGTTC |
| | GGCAACCTGATTGCCCTGAGCCTGGGCCTGACCCCCAACTTCAAGAGCAA |
| | CTTCGACCTGGCCGAGGATGCCAAACTGCAGCTGAGCAAGGACACCTACG |
| | ACGACGACCTGGACAACCTGCTGGCCCAGATCGGCGACCAGTACGCCGAC |
| | CTGTTTCTGGCCGCCAAGAACCTGTCCGACGCCATCCTGCTGAGCGACAT |
| | CCTGAGAGTGAACACCGAGATCACCAAGGCCCCCCTGAGCGCCTCTATGA |
| | TCAAGAGATACGACGAGCACCACCAGGACCTGACCCTGCTGAAAGCTCTC |
| | GTGCGGCAGCAGCTGCCTGAGAAGTACAAAGAGATTTTCTTCGACCAGAG |
| | CAAGAACGGCTACGCCGGCTACATCGATGGCGGAGCCAGCCAGGAAGAGT |
| | TCTACAAGTTCATCAAGCCCATCCTGGAAAAGATGGACGGCACCGAGGAA |
| | CTGCTCGTGAAGCTGAACAGAGAGGACCTGCTGCGGAAGCAGCGGACCTT |
| | CGACAACGGCAGCATCCCCCACCAGATCCACCTGGGAGAGCTGCACGCCA |
| | TTCTGCGGCGGCAGGAAGATTTTTACCCATTCCTGAAGGACAACCGGGAA |
| | AAGATCGAGAAGATCCTGACCTTCCGCATCCCCTACTACGTGGGCCCTCT |
| | GGCCAGGGGAAACAGCAGATTCGCCTGGATGACCAGAAAGAGCGAGGAAA |
| | CCATCACCCCCTGGAACTTCGAGGAAGTGGTGGACAAGGGCGCCAGCGCC |
| | CAGAGCTTCATCGAGCGGATGACCAACTTCGATAAGAACCTGCCCAACGA |
| | GAAGGTGCTGCCCAAGCACAGCCTGCTGTACGAGTACTTCACCGTGTACA |
| | ACGAGCTGACCAAAGTGAAATACGTGACCGAGGGAATGAGAAAGCCCGCC |
| | TTCCTGAGCGGCGAGCAGAAAAAAGCCATCGTGGACCTGCTGTTCAAGAC |
| | CAACCGGAAAGTGACCGTGAAGCAGCTGAAAGAGGACTACTTCAAGAAAA |
| | TCGAGTGCTTCGACTCCGTGGAAATCTCCGGCGTGGAAGATCGGTTCAAC |
| | GCCTCCCTGGGCACATACCACGATCTGCTGAAAATTATCAAGGACAAGGA |
| | CTTCCTGGACAATGAGGAAAACGAGGACATTCTGGAAGATATCGTGCTGA |
| | CCCTGACACTGTTTGAGGACAGAGAGATGATCGAGGAACGGCTGAAAACC |
| | TATGCCCACCTGTTCGACGACAAAGTGATGAAGCAGCTGAAGCGGCGGAG |
| | ATACACCGGCTGGGGCAGGCTGAGCCGGAAGCTGATCAACGGCATCCGGG |
| | ACAAGCAGTCCGGCAAGACAATCCTGGATTTCCTGAAGTCCGACGGCTTC |
| | GCCAACAGAAACTTCATGCAGCTGATCCACGACGACAGCCTGACCTTTAA |
| | AGAGGACATCCAGAAAGCCCAGGTGTCCGGCCAGGGCGATAGCCTGCACG |
| | AGCACATTGCCAATCTGGCCGGCAGCCCCGCCATTAAGAAGGGCATCCTG |
| | CAGACAGTGAAGGTGGTGGACGAGCTCGTGAAAGTGATGGGCCGGCACAA |
| | GCCCGAGAACATCGTGATCGAAATGGCCAGAGAGAACCAGACCACCCAGA |
| | AGGGACAGAAGAACAGCCGCGAGAGAATGAAGCGGATCGAAGAGGGCATC |
| | AAAGAGCTGGGCAGCCAGATCCTGAAAGAACACCCCGTGGAAAACACCCA |
| | GCTGCAGAACGAGAAGCTGTACCTGTACTACCTGCAGAATGGGCGGGATA |
| | TGTACGTGGACCAGGAACTGGACATCAACCGGCTGTCCGACTACGATGTG |
| | GACGCTATCGTGCCTCAGAGCTTTCTGAAGGACGACTCCATCGATAACAA |
| | AGTGCTGACTCGGAGCGACAAGAACCGGGGCAAGAGCGACAACGTGCCCT |
| | CCGAAGAGGTCGTGAAGAAGATGAAGAACTACTGGCGCCAGCTGCTGAAT |
| | GCCAAGCTGATTACCCAGAGGAAGTTCGACAATCTGACCAAGGCCGAGAG |
| | AGGCGGCCTGAGCGAACTGGATAAGGCCGGCTTCATCAAGAGACAGCTGG |
| | TGGAAACCCGGCAGATCACAAAGCACGTGGCACAGATCCTGGACTCCCGG |
| | ATGAACACTAAGTACGACGAGAACGACAAACTGATCCGGGAAGTGAAAGT |
| | GATCACCCTGAAGTCCAAGCTGGTGTCCGATTTCCGGAAGGATTTCCAGT |
| | TTTACAAAGTGCGCGAGATCAACAACTACCACCACGCCCACGACGCCTAC |
| | CTGAACGCCGTCGTGGGAACCGCCCTGATCAAAAAGTACCCTAAGCTGGA |
| | AAGCGAGTTCGTGTACGGCGACTACAAGGTGTACGACGTGCGGAAGATGA |
| | TCGCCAAGAGCGAGCAGGAAATCGGCAAGGCTACCGCCAAGTACTTCTTC |
| | TACAGCAACATCATGAACTTTTTCAAGACCGAGATTACCCTGGCCAACGG |
| | CGAGATCCGGAAGCGGCCTCTGATCGAGACAAACGGCGAAACAGGCGAGA |
| | TCGTGTGGGATAAGGGCCGGGACTTTGCCACCGTGCGGAAAGTGCTGTCT |
| | ATGCCCCAAGTGAATATCGTGAAAAAGACCGAGGTGCAGACAGGCGGCTT |
| | CAGCAAAGAGTCTATCCTGCCCAAGAGGAACAGCGACAAGCTGATCGCCA |
| | GAAAGAAGGACTGGGACCCTAAGAAGTACGGCGGCTTCGACAGCCCCACC |
| | GTGGCCTATTCTGTGCTGGTGGTGGCCAAAGTGGAAAAGGGCAAGTCCAA |
| | GAAACTGAAGAGTGTGAAAGAGCTGCTGGGGATCACCATCATGGAAAGAA |
| | GCAGCTTCGAGAAGAATCCCATCGACTTTCTGGAAGCCAAGGGCTACAAA |
| | GAAGTGAAAAAGGACCTGATCATCAAGCTGCCTAAGTACTCCCTGTTCGA |
| | GCTGGAAAACGGCCGGAAGAGAATGCTGGCCTCTGCCGGCGAACTGCAGA |
| | AGGGAAACGAACTGGCCCTGCCCTCCAAATATGTGAACTTCCTGTACCTG |
| | GCCAGCCACTATGAGAAGCTGAAGGGCTCCCCCGAGGATAATGAGCAGAA |
| | ACAGCTGTTTGTGGAACAGCACAAACACTACCTGGACGAGATCATCGAGC |
| | AGATCAGCGAGTTCTCCAAGAGAGTGATCCTGGCCGACGCTAATCTGGAC |
| | AAGGTGCTGAGCGCCTACAACAAGCACAGAGACAAGCCTATCAGAGAGCA |
| | GGCCGAGAATATCATCCACCTGTTTACCCTGACCAATCTGGGAGCCCCTG |
| | CCGCCTTCAAGTACTTTGACACCACCATCGACCGGAAGAGGTACACCAGC |
| | ACCAAAGAGGTGCTGGACGCCACCCTGATCCACCAGAGCATCACCGGCCT |
| | GTACGAGACACGGATCGACCTGTCTCAGCTGGGAGGCGACCTCGAGGGCG |
| | GATCCGGTGGTTCCGGAGGAGCTGTCGACATGTCCGGGGGCAGCAGCTGC |
| | AGCCAGACCCCAAGCGCTGCCGCAGCCGCCACTCGCCGGGTGGTGCTCGG |
| | CGCCGGCGTGCAGCTCCCGCCCGGGGACTACAGCACGGCCCCCGGCGGCA |
| | CGCTCTTCAGCACCGCCCCGGGAGGTACCAGGATCATCTATGACCGGAAA |
| | TTCCTGATGGAGTGTCGGAACGCACCTGTGACCAAAGCACCCCCAAGGGA |
| | TCTGCCCACCATTCCGGGGGTCACCAGCCCTTCCAGTGATGAGCCCCCCA |
| | TGGAAGCCAGCCAGAGCCACCTGCGCAATAGCCCAGAAGATAAGCGGGCG |
| | GGCGGTGAAGAGTCACAGGCTGAGATGGACATTTCTAGACTTAAGTAAGC |
| | CTCGACTGTGCCTTCTAGTTGCCAGCCATCTGTTGTTTGCCCCTCCCCCG |
| | TGCCTTCCTTGACCCTGGAAGGTGCCACTCCCACTGTCCTTTCCTAATAA |
| | AATGAGGAAATTGCATCGCATTGTCTGAGTAGGTGTCATTCTATTCTGGG |
| | GGGTGGGGTGGGGCAGGACAGCAAGGGGGAGGATTGGGAAGACAATAGCA |
| | GGCATGCTGGGGAGTGCCCGTCAGTGGGCAGAGCGCACATCGCCCACAGT |
| | CCCCGAGAAGTTGGGGGGAGGGGTCGGCAATTGAACGGGTGCCTAGAGAA |
| | GGTGGCGCGGGGTAAACTGGGAAAGTGATGTCGTGTACTGGCTCCGCCTT |
| | TTTCCCGAGGGTGGGGGAGAACCGTATATAAGTGCAGTAGTCGCCGTGAA |
| | CGTTCTTTTTCGCAACGGGTTTGCCGCCAGAACACAGATGGTCTCTAAAG |
| | GAGGTTCGTCCGACGACGAAGCAACAGCGGACTCGCAGCACGCCGCACCT |
| | CCTAAGAAGAAAAGGAAGGTAGGGGATCCCCGGGTACCGGTCGCCACCAT |
| | GGTGAGCAAGGGCGAGGAGCTGTTCACCGGGGTGGTGCCCATCCTGGTCG |
| | AGCTGGACGGCGACGTAAACGGCCACAAGTTCAGCGTGTCCGGCGAGGGC |
| | GAGGGCGATGCCACCTACGGCAAGCTGACCCTGAAGTTCATCTGCACCAC |
| | CGGCAAGCTGCCCGTGCCCTGGCCCACCCTCGTGACCACCCTGTCCTGGG |
| | GCGTGCAGTGCTTCGCCCGCTACCCCGACCACATGAAGCAGCACGACTTC |
| | TTCAAGTCCGCCATGCCCGAAGGCTACGTCCAGGAGCGCACCATCTTCTT |
| | CAAGGACGACGGCAACTACAAGACCCGCGCCGAGGTGAAGTTCGAGGGCG |
| | ACACCCTGGTGAACCGCATCGAGCTGAAGGGCATCGACTTCAAGGAGGAC |
| | GGCAACATCCTGGGGCACAAGCTGGAGTACAACTACTTTAGCGACAACGT |
| | CTATATCACCGCCGACAAGCAGAAGAACGGCATCAAGGCCAACTTCAAGA |
| | TCCGCCACAACATCGAGGACGGCGGCGTGCAGCTCGCCGACCACTACCAG |
| | CAGAACACCCCCATCGGCGACGGCCCCGTGCTGCTGCCCGACAACCACTA |
| | CCTGAGCACCCAGTCCAAGCTGAGCAAAGACCCCAACGAGAAGCGCGATC |
| | ACATGGTCCTGCTGGAGTTCGTGACCGCCGCCGGGATCACTCTCGGCATG |
| | GACGAGCTGTACAAGTAAAATCAACCTCTGGATTACAAAATTTGTGAAAG |
| | ATTGACTGGTATTCTTAACTATGTTGCTCCTTTTACGCTATGTGGATACG |
| | CTGCTTTAATGCCTTTGTATCATGTTAACTAAACTTGTTTATTGCAGCTT |
| | ATAATGGTTACAAATAAAGCAATAGCATCACAAATTTCACAAATAAAGCA |
| | TTTTTTTCACTGCATTCTAGTTGTGGTTTGTCCAAACTCATCAATGTATC |
| | TTATCATGTCTGGAATTGACTCAAATGATGTCAATTAGTCTATCAGAAGC |
| | TCATCTGGTCTCCCTTCCGGGGGACAAGACATCCCTGTTTAATATTTAAA |
| | CAGCAGTGTTCCCAAACTGGGTTCTTATATCCCTTGCTCTGGTCAACCAG |
| | GTTGCAGGGTTTCCTGTCCTCACAGGAACGAAGTCCCTAAAGAAACAGTG |
| | GCAGCCAGGTTTAGCCCCGGAATTGACTGGATTCCTTTTTTAGGGCCCAT |
| | TGGTATGGCTTTTTCCCCGTATCCCCCCAGGTGTCTGCAGGCTCAAAGAG |
| | CAGCGAGAAGCGTTCAGAGGAAAGCGATCCCGTGCCACCTTCCCCGTGCC |
| | CGGGCTGTCCCCGCACGCTGCCGGCTCGGGGATGCGGGGGGAGCGCCGGA |
| | CCGGAGCGGAGCCCCGGGCGGCTCGCTGCTGCCCCCTAGCGGGGGAGGGA |
| | CGTAATTACATCCCTGGGGGCTTTGGGGGGGGGCTGTCCCTGATATCTAT |
| | AACAAGAAAATATATATATAATAAGTTATCACGTAAGTAGAACATGAAAT |
| | AACAATATAATTATCGTATGAGTTAAATCTTAAAAGTCACGTAAAAGATA |
| | ATCATGCGTCATTTTGACTCACGCGGTCGTTATAGTTCAAAATCAGTGAC |
| | ACTTACCGCATTGACAAGCACGCCTCACGGGAGCTCCAAGCGGCGACTGA |
| | GATGTCCTAAATGCACAGCGACGGATTCGCGCTATTTAGAAAGAGAGAGC |
| | AATATTTCAAGAATGCATGCGTCAATTTTACGCAGACTATCTTTCTAGGG |
| | TTAATCTAGCTGCATCAGGATCATATCGTCGGGTCTTTTTTCCGGCTCAG |
| | TCATCGCCCAAGCTGGCGCTATCTGGGCATCGGGGAGGAAGAAGCCCGTG |
| | CCTTTTCCCGCGAGGTTGAAGCGGCATGGAAAGAGTTTGCCGAGGATGAC |
| | TGCTGCTGCATTGACGTTGAGCGAAAACGCACGTTTACCATGATGATTCG |
| | GGAAGGTGTGGCCATGCACGCCTTTAACGGTGAACTGTTCGTTCAGGCCA |
| | CCTGGGATACCAGTTCGTCGCGGCTTTTCCGGACACAGTTCCGGATGGTC |
| | AGCCCGAAGCGCATCAGCAACCCGAACAATACCGGCGACAGCCGGAACTG |
| | CCGTGCCGGTGTGCAGATTAATGACAGCGGTGCGGCGCTGGGATATTACG |
| | TCAGCGAGGACGGGTATCCTGGCTGGATGCCGCAGAAATGGACATGGATA |
| | CCCCGTGAGTTACCCGGCGGGCGCGCTTGGCGTAATCATGGTCATAGCTG |
| | TTTCCTGTGTGAAATTGTTATCCGCTCACAATTCCACACAACATACGAGC |
| | CGGAAGCATAAAGTGTAAAGCCTGGGGTGCCTAATGAGTGAGCTAACTCA |
| | CATTAATTGCGTTGCGCTCACTGCCCGCTTTCCAGTCGGGAAACCTGTCG |
| | TGCCAGCTGCATTAATGAATCGGCCAACGCGCGGGGAGAGGCGGTTTGCG |
| | TATTGGGCGCTCTTCCGCTTCCTCGCTCACTGACTCGCTGCGCTCGGTCG |
| | TTCGGCTGCGGCGAGCGGTATCAGCTCACTCAAAGGCGGTAATACGGTTA |
| | TCCACAGAATCAGGGGATAACGCAGGAAAGAACATGTGAGCAAAAGGCCA |
| | GCAAAAGGCCAGGAACCGTAAAAAGGCCGCGTTGCTGGCGTTTTTCCATA |
| | GGCTCCGCCCCCCTGACGAGCATCACAAAAATCGACGCTCAAGTCAGAGG |
| | TGGCGAAACCCGACAGGACTATAAAGATACCAGGCGTTTCCCCCTGGAAG |
| | CTCCCTCGTGCGCTCTCCTGTTCCGACCCTGCCGCTTACCGGATACCTGT |
| | CCGCCTTTCTCCCTTCGGGAAGCGTGGCGCTTTCTCATAGCTCACGCTGT |
| | AGGTATCTCAGTTCGGTGTAGGTCGTTCGCTCCAAGCTGGGCTGTGTGCA |
| | CGAACCCCCCGTTCAGCCCGACCGCTGCGCCTTATCCGGTAACTATCGTC |
| | TTGAGTCCAACCCGGTAAGACACGACTTATCGCCACTGGCAGCAGCCACT |
| | GGTAACAGGATTAGCAGAGCGAGGTATGTAGGCGGTGCTACAGAGTTCTT |
| | GAAGTGGTGGCCTAACTACGGCTACACTAGAAGGACAGTATTTGGTATCT |
| | GCGCTCTGCTGAAGCCAGTTACCTTCGGAAAAAGAGTTGGTAGCTCTTGA |
| | TCCGGCAAACAAACCACCGCTGGTAGCGGTGGTTTTTTTGTTTGCAAGCA |
| | GCAGATTACGCGCAGAAAAAAAGGATCTCAAGAAGATCCTTTGATCTTTT |
| | CTACGGGGTCTGACGCTCAGTGGAACGAAAACTCACGTTAAGGGATTTTG |
| | GTCATGAGATTATCAAAAAGGATCTTCACCTAGATCCTTTTAAATTAAAA |
| | ATGAAGTTTTAAATCAATCTAAAGTATATATGAGTAAACTTGGTCTGACA |
| | GTTACCAATGCTTAATCAGTGAGGCACCTATCTCAGCGATCTGTCTATTT |
| | CGTTCATCCATAGTTGCCTGACTCCCCGTCGTGTAGATAACTACGATACG |
| | GGAGGGCTTACCATCTGGCCCCAGTGCTGCAATGATACCGCGAGACCCAC |
| | GCTCACCGGCTCCAGATTTATCAGCAATAAACCAGCCAGCCGGAAGGGCC |
| | GAGCGCAGAAGTGGTCCTGCAACTTTATCCGCCTCCATCCAGTCTATTAA |
| | TTGTTGCCGGGAAGCTAGAGTAAGTAGTTCGCCAGTTAATAGTTTGCGCA |
| | ACGTTGTTGCCATTGCTACAGGCATCGTGGTGTCACGCTCGTCGTTTGGT |
| | ATGGCTTCATTCAGCTCCGGTTCCCAACGATCAAGGCGAGTTACATGATC |
| | CCCCATGTTGTGCAAAAAAGCGGTTAGCTCCTTCGGTCCTCCGATCGTTG |
| | TCAGAAGTAAGTTGGCCGCAGTGTTATCACTCATGGTTATGGCAGCACTG |
| | CATAATTCTCTTACTGTCATGCCATCCGTAAGATGCTTTTCTGTGACTGG |
| | TGAGTACTCAACCAAGTCATTCTGAGAATAGTGTATGCGGCGACCGAGTT |
| | GCTCTTGCCCGGCGTCAATACGGGATAATACCGCGCCACATAGCAGAACT |
| | TTAAAAGTGCTCATCATTGGAAAACGTTCTTCGGGGCGAAAACTCTCAAG |
| | GATCTTACCGCTGTTGAGATCCAGTTCGATGTAACCCACTCGTGCACCCA |
| | ACTGATCTTCAGCATCTTTTACTTTCACCAGCGTTTCTGGGTGAGCAAAA |
| | ACAGGAAGGCAAAATGCCGCAAAAAAGGGAATAAGGGCGACACGGAAATG |
| | TTGAATACTCAT (SEQ ID NO: 78) |
| PspCas13b | MNIPALVENQKKYFGTYSVMAMLNAQTVLDHIQKVADIEGEQNEN |
| | NENLWFHPVMSHLYNAKNGYDKQPEKTMFIIERLQSYFPFLKIMA |
| | ENQREYSNGKYKQNRVEVNSNDIFEVLKRAFGVLKMYRDLTNAYK |
| | TYEEKLNDGCEFLTSTEQPLSGMINNYYTVALRNMNERYGYKTED |
| | LAFIQDKRFKFVKDAYGKKKSQVNTGFFLSLQDYNGDTQKKLHLS |
| | GVGIALLICLFLDKQYINIFLSRLPIFSSYNAQSEERRIIIRSFG |
| | INSIKLPKDRIHSEKSNKSVAMDMLNEVKRCPDELFTTLSAEKQS |
| | RFRIISDDHNEVLMKRSSDRFVPLLLQYIDYGKLFDHIRFHVNMG |
| | KLRYLLKADKTCIDGQTRVRVIEQPLNGFGRLEEAETMRKQENGT |
| | FGNSGIRIRDFENMKRDDANPANYPYIVDTYTHYILENNKVEMFI |
| | NDKEDSAPLLPVIEDDRYVVKTIPSCRMSTLEIPAMAFHMFLFGS |
| | KKTEKLIVDVHNRYKRLFQAMQKEEVTAENIASFGIAESDLPQKI |
| | LDLISGNAHGKDVDAFIRLTVDDMLTDTERRIKRFKDDRKSIRSA |
| | DNKMGKRGFKQISTGKLADFLAKDIVLFQPSVNDGENKITGLNYR |
| | IMQSAIAVYDSGDDYEAKQQFKLMFEKARLIGKGTTEPHPFLYKV |
| | FARSIPANAVEFYERYLIERKFYLTGLSNEIKKGNRVDVPFIRRD |
| | QNKWKTPAMKTLGRIYSEDLPVELPRQMFDNEIKSHLKSLPQMEG |
| | IDFNNANVTYLIAEYMKRVLDDDFQTFYQWNRNYRYMDMLKGEYD |
| | RKGSLQHCFTSVEEREGLWKERASRTERYRKQASNKIRSNRQMRN |
| | ASSEEIETILDKRLSNSRNEYQKSEKVIRRYRVQDALLFLLAKKT |
| | LTELADFDGERFKLKEIMPDAEKGILSEIMPMSFTFEKGGKKYTI |
| | TSEGMKLKNYGDFFVLASDKRIGNLLELVGSDIVSKEDIMEEFNK |
| | YDQCRPEISSIVFNLEKWAFDTYPELSARVDREEKVDFKSILKIL |
| | LNNKNINKEQSDILRKIRNAFDANNYPDKGVVEIKALPEIAMSIK |
| | KAFGEYAIMK (SEQ ID NO: 79) |
| PB-TRE-V5- | ACTCTTCCTTTTTCAATATTATTGAAGCATTTATCAGGGTTATTG |
| dCas13b- | TCTCATGAGCGGATACATATTTGAATGTATTTAGAAAAATAAACA |
| mut (EIF4E) EF | AATAGGGGTTCCGCGCACATTTCCCCGAAAAGTGCCACCTAAATT |
| NLS-Turq | GTAAGCGTTAATATTTTGTTAAAATTCGCGTTAAATTTTTGTTAA |
| | ATCAGCTCATTTTTTAACCAATAGGCCGAAATCGGCAAAATCCCT |
| | TATAAATCAAAAGAATAGACCGAGATAGGGTTGAGTGTTGTTCCA |
| | GTTTGGAACAAGAGTCCACTATTAAAGAACGTGGACTCCAACGTC |
| | AAAGGGCGAAAAACCGTCTATCAGGGCGATGGCCCACTACGTGAA |
| | CCATCACCCTAATCAAGTTTTTTGGGGTCGAGGTGCCGTAAAGCA |
| | CTAAATCGGAACCCTAAAGGGAGCCCCCGATTTAGAGCTTGACGG |
| | GGAAAGCCGGCGAACGTGGCGAGAAAGGAAGGGAAGAAAGCGAAA |
| | GGAGCGGGCGCTAGGGCGCTGGCAAGTGTAGCGGTCACGCTGCGC |
| | GTAACCACCACACCCGCCGCGCTTAATGCGCCGCTACAGGGCGCG |
| | TCCCATTCGCCATTCAGGCTGCGCAACTGTTGGGAAGGGCGATCG |
| | GTGCGGGCCTCTTCGCTATTACGCCAGCTGGCGAAAGGGGGATGT |
| | GCTGCAAGGCGATTAAGTTGGGTAACGCCAGGGTTTTCCCAGTCA |
| | CGACGTTGTAAAACGACGGCCAGTGAGCGCGCCTCGTTCATTCAC |
| | GTTTTTGAACCCGTGGAGGACGGGCAGACTCGCGGTGCAAATGTG |
| | TTTTACAGCGTGATGGAGCAGATGAAGATGCTCGACACGCTGCAG |
| | AACACGCAGCTAGATTAACCCTAGAAAGATAATCATATTGTGACG |
| | TACGTTAAAGATAATCATGTGTAAAATTGACGCATGTGTTTTATC |
| | GGTCTGTATATCGAGGTTTATTTATTAATTTGAATAGATATTAAG |
| | TTTTATTATATTTACACTTACATACTAATAATAAATTCAACAAAC |
| | AATTTATTTATGTTTATTTATTTATTAAAAAAAACAAAAACTCAA |
| | AATTTCTTCTATAAAGTAACAAAACTTTTATGAGGGACAGCCCCC |
| | CCCCAAAGCCCCCAGGGATGTAATTACGTCCCTCCCCCGCTAGGG |
| | GGCAGCAGCGAGCCGCCCGGGGCTCCGCTCCGGTCCGGCGCTCCC |
| | CCCGCATCCCCGAGCCGGCAGCGTGCGGGGACAGCCCGGGCACGG |
| | GGAAGGTGGCACGGGATCGCTTTCCTCTGAACGCTTCTCGCTGCT |
| | CTTTGAGCCTGCAGACACCTGGGGGGATACGGGGAAAAGGCCTCC |
| | ACGGCCACTAGTTCTACCGGGTAGGGGAGGCGCTTTTCCCAAGGC |
| | AGTCTGGAGCATGCGCTTTAGCAGCCCCGCTGGGCACTTGGCGCT |
| | ACACAAGTGGCCTCTGGCCTCGCACACATTCCACATCCACCGGTA |
| | GGCGCCAACCGGCTCCGTTCTTTGGTGGCCCCTTCGCGCCACCTT |
| | CTACTCCTCCCCTAGTCAGGAAGTTCCCCCCCGCCCCGCAGCTCG |
| | CGTCGTGCAGGACGTGACAAATGGAAGTAGCACGTCTCATTAGTC |
| | TCGTGCAGATGGACAGCACCGCTGAGCAATGGAAGCGGGTAGGCC |
| | TTTGGGGCAGCGGCCAATAGCAGCTTTGCTCCTTCGCTTTCTGGG |
| | CTCAGAGGCTGGGAAGGGGTGGGTCCGGGGGCGGGCTCAGGGGCG |
| | GGCTCAGGGGCGGGGCGGGCGCCCGAAGGTCCTCCGGAGGCCCGG |
| | CATTCTGCACGCTTCAAAAGCGCACGTCTGCCGCGCTGTTCTCCT |
| | CTTCCTCATCTCCGGGCCTTTCGACCTGCAGGTTAATTAAATGGG |
| | TAAGCCTATCCCTAACCCTCTCCTCGGTCTCGATTCTACGGCTAG |
| | CATGAACATCCCCGCTCTGGTGGAAAACCAGAAGAAGTACTTTGG |
| | CACCTACAGCGTGATGGCCATGCTGAACGCTCAGACCGTGCTGGA |
| | CCACATCCAGAAGGTGGCCGATATTGAGGGCGAGCAGAACGAGAA |
| | CAACGAGAATCTGTGGTTTCACCCCGTGATGAGCCACCTGTACAA |
| | CGCCAAGAACGGCTACGACAAGCAGCCCGAGAAAACCATGTTCAT |
| | CATCGAGCGGCTGCAGAGCTACTTCCCATTCCTGAAGATCATGGC |
| | CGAGAACCAGAGAGAGTACAGCAACGGCAAGTACAAGCAGAACCG |
| | CGTGGAAGTGAACAGCAACGACATCTTCGAGGTGCTGAAGCGCGC |
| | CTTCGGCGTGCTGAAGATGTACAGGGACCTGACCAACGCATACAA |
| | GACCTACGAGGAAAAGCTGAACGACGGCTGCGAGTTCCTGACCAG |
| | CACAGAGCAACCTCTGAGCGGCATGATCAACAACTACTACACAGT |
| | GGCCCTGCGGAACATGAACGAGAGATACGGCTACAAGACAGAGGA |
| | CCTGGCCTTCATCCAGGACAAGCGGTTCAAGTTCGTGAAGGACGC |
| | CTACGGCAAGAAAAAGTCCCAAGTGAATACCGGATTCTTCCTGAG |
| | CCTGCAGGACTACAACGGCGACACACAGAAGAAGCTGCACCTGAG |
| | CGGAGTGGGAATCGCCCTGCTGATCTGCCTGTTCCTGGACAAGCA |
| | GTACATCAACATCTTTCTGAGCAGGCTGCCCATCTTCTCCAGCTA |
| | CAATGCCCAGAGCGAGGAACGGCGGATCATCATCAGATCCTTCGG |
| | CATCAACAGCATCAAGCTGCCCAAGGACCGGATCCACAGCGAGAA |
| | GTCCAACAAGAGCGTGGCCATGGATATGCTCAACGAAGTGAAGCG |
| | GTGCCCCGACGAGCTGTTCACAACACTGTCTGCCGAGAAGCAGTC |
| | CCGGTTCAGAATCATCAGCGACGACCACAATGAAGTGCTGATGAA |
| | GCGGAGCAGCGACAGATTCGTGCCTCTGCTGCTGCAGTATATCGA |
| | TTACGGCAAGCTGTTCGACCACATCAGGTTCCACGTGAACATGGG |
| | CAAGCTGAGATACCTGCTGAAGGCCGACAAGACCTGCATCGACGG |
| | CCAGACCAGAGTCAGAGTGATCGAGCAGCCCCTGAACGGCTTCGG |
| | CAGACTGGAAGAGGCCGAGACAATGCGGAAGCAAGAGAACGGCAC |
| | CTTCGGCAACAGCGGCATCCGGATCAGAGACTTCGAGAACATGAA |
| | GCGGGACGACGCCAATCCTGCCAACTATCCCTACATCGTGGACAC |
| | CTACACACACTACATCCTGGAAAACAACAAGGTCGAGATGTTTAT |
| | CAACGACAAAGAGGACAGCGCCCCACTGCTGCCCGTGATCGAGGA |
| | TGATAGATACGTGGTCAAGACAATCCCCAGCTGCCGGATGAGCAC |
| | CCTGGAAATTCCAGCCATGGCCTTCCACATGTTTCTGTTCGGCAG |
| | CAAGAAAACCGAGAAGCTGATCGTGGACGTGCACAACCGGTACAA |
| | GAGACTGTTCCAGGCCATGCAGAAAGAAGAAGTGACCGCCGAGAA |
| | TATCGCCAGCTTCGGAATCGCCGAGAGCGACCTGCCTCAGAAGAT |
| | CCTGGATCTGATCAGCGGCAATGCCCACGGCAAGGATGTGGACGC |
| | CTTCATCAGACTGACCGTGGACGACATGCTGACCGACACCGAGCG |
| | GAGAATCAAGAGATTCAAGGACGACCGGAAGTCCATTCGGAGCGC |
| | CGACAACAAGATGGGAAAGAGAGGCTTCAAGCAGATCTCCACAGG |
| | CAAGCTGGCCGACTTCCTGGCCAAGGACATCGTGCTGTTTCAGCC |
| | CAGCGTGAACGATGGCGAGAACAAGATCACCGGCCTGAACTACCG |
| | GATCATGCAGAGCGCCATTGCCGTGTACGATAGCGGCGACGATTA |
| | CGAGGCCAAGCAGCAGTTCAAGCTGATGTTCGAGAAGGCCCGGCT |
| | GATCGGCAAGGGCACAACAGAGCCTCATCCATTTCTGTACAAGGT |
| | GTTCGCCCGCAGCATCCCCGCCAATGCCGTCGAGTTCTACGAGCG |
| | CTACCTGATCGAGCGGAAGTTCTACCTGACCGGCCTGTCCAACGA |
| | GATCAAGAAAGGCAACAGAGTGGATGTGCCCTTCATCCGGCGGGA |
| | CCAGAACAAGTGGAAAACACCCGCCATGAAGACCCTGGGCAGAAT |
| | CTACAGCGAGGATCTGCCCGTGGAACTGCCCAGACAGATGTTCGA |
| | CAATGAGATCAAGTCCCACCTGAAGTCCCTGCCACAGATGGAAGG |
| | CATCGACTTCAACAATGCCAACGTGACCTATCTGATCGCCGAGTA |
| | CATGAAGAGAGTGCTGGACGACGACTTCCAGACCTTCTACCAGTG |
| | GAACCGCAACTACCGGTACATGGACATGCTTAAGGGCGAGTACGA |
| | CAGAAAGGGCTCCCTGCAGCACTGCTTCACCAGCGTGGAAGAGAG |
| | AGAAGGCCTCTGGAAAGAGCGGGCCTCCAGAACAGAGCGGTACAG |
| | AAAGCAGGCCAGCAACAAGATCCGCAGCAACCGGCAGATGAGAAA |
| | CGCCAGCAGCGAAGAGATCGAGACAATCCTGGATAAGCGGCTGAG |
| | CAACAGCCGGAACGAGTACCAGAAAAGCGAGAAAGTGATCCGGCG |
| | CTACAGAGTGCAGGATGCCCTGCTGTTTCTGCTGGCCAAAAAGAC |
| | CCTGACCGAACTGGCCGATTTCGACGGCGAGAGGTTCAAACTGAA |
| | AGAAATCATGCCCGACGCCGAGAAGGGAATCCTGAGCGAGATCAT |
| | GCCCATGAGCTTCACCTTCGAGAAAGGCGGCAAGAAGTACACCAT |
| | CACCAGCGAGGGCATGAAGCTGAAGAACTACGGCGACTTCTTTGT |
| | GCTGGCTAGCGACAAGAGGATCGGCAACCTGCTGGAACTCGTGGG |
| | CAGCGACATCGTGTCCAAAGAGGATATCATGGAAGAGTTCAACAA |
| | ATACGACCAGTGCAGGCCCGAGATCAGCTCCATCGTGTTCAACCT |
| | GGAAAAGTGGGCCTTCGACACATACCCCGAGCTGTCTGCCAGAGT |
| | GGACCGGGAAGAGAAGGTGGACTTCAAGAGCATCCTGAAAATCCT |
| | GCTGAACAACAAGAACATCAACAAAGAGCAGAGCGACATCCTGCG |
| | GAAGATCCGGAACGCCTTCGATGCAAACAATTACCCCGACAAAGG |
| | CGTGGTGGAAATCAAGGCCCTGCCTGAGATCGCCATGAGCATCAA |
| | GAAGGCCTTTGGGGAGTACGCCATCATGAAGCTCGAGGGCGGATC |
| | CGGTGGTTCCGGAGGAGCTGTCGACATGGCGACTGTCGAACCGGA |
| | AACCACCCCTACTCCTAATCCCCCGACTACAGAAGAGGAGAAAAC |
| | GGAATCTAATCAGGAGGTTGCTAACCCAGAACACTATATTAAACG |
| | GCCCCTACAGAACAGATGGGCACTCTGGTTTTTTAAAAATGATAA |
| | AAGCAAAACTTGGCAAGCAAACCTGCGGCTGATCTCCAAGTTTGA |
| | TACTGCTGAAGACTTTTTTGCTCTGTACAACCATATCCAGTTGTC |
| | TAGTAATTTAATGCCTGGCTGTGACTACTCACTTTTTAAGGATGG |
| | TATTGAGCCTATGTGGGAAGATGAGAAAAACAAACGGGGAGGACG |
| | ATGGCTAATTACATTGAACAAACAGCAGAGACGAAGTGACCTCGA |
| | TCGCTTTTGGCTAGAGACACTTCTGTGCCTTATTGGAGAATCTTT |
| | TGATGACTACAGTGATGATGTATGTGGCGCTGTTGTTAATGTTAG |
| | AGCTAAAGGTGATAAGATAGCAATATGGACTACTGAATGTGAAAA |
| | CAGAGAAGCTGTTACACATATAGGGAGGGTATACAAGGAAAGGTT |
| | AGGACTTCCTCCAAAGATAGTGATTGGTTATCAGTCCCACGCAGA |
| | CACAGCTACTAAGAGCGGCGACACCACTAAAAATAGGTTTGTTGT |
| | TTCTAGACTTAAGTAAGCCTCGACTGTGCCTTCTAGTTGCCAGCC |
| | ATCTGTTGTTTGCCCCTCCCCCGTGCCTTCCTTGACCCTGGAAGG |
| | TGCCACTCCCACTGTCCTTTCCTAATAAAATGAGGAAATTGCATC |
| | GCATTGTCTGAGTAGGTGTCATTCTATTCTGGGGGGTGGGGTGGG |
| | GCAGGACAGCAAGGGGGAGGATTGGGAAGACAATAGCAGGCATGC |
| | TGGGGAGTGCCCGTCAGTGGGCAGAGCGCACATCGCCCACAGTCC |
| | CCGAGAAGTTGGGGGGAGGGGTCGGCAATTGAACGGGTGCCTAGA |
| | GAAGGTGGCGCGGGGTAAACTGGGAAAGTGATGTCGTGTACTGGC |
| | TCCGCCTTTTTCCCGAGGGTGGGGGAGAACCGTATATAAGTGCAG |
| | TAGTCGCCGTGAACGTTCTTTTTCGCAACGGGTTTGCCGCCAGAA |
| | CACAGATGGTCTCTAAAGGAGGTTCGTCCGACGACGAAGCAACAG |
| | CGGACTCGCAGCACGCCGCACCTCCTAAGAAGAAAAGGAAGGTAG |
| | GGGATCCCCGGGTACCGGTCGCCACCATGGTGAGCAAGGGCGAGG |
| | AGCTGTTCACCGGGGTGGTGCCCATCCTGGTCGAGCTGGACGGCG |
| | ACGTAAACGGCCACAAGTTCAGCGTGTCCGGCGAGGGCGAGGGCG |
| | ATGCCACCTACGGCAAGCTGACCCTGAAGTTCATCTGCACCACCG |
| | GCAAGCTGCCCGTGCCCTGGCCCACCCTCGTGACCACCCTGTCCT |
| | GGGGCGTGCAGTGCTTCGCCCGCTACCCCGACCACATGAAGCAGC |
| | ACGACTTCTTCAAGTCCGCCATGCCCGAAGGCTACGTCCAGGAGC |
| | GCACCATCTTCTTCAAGGACGACGGCAACTACAAGACCCGCGCCG |
| | AGGTGAAGTTCGAGGGCGACACCCTGGTGAACCGCATCGAGCTGA |
| | AGGGCATCGACTTCAAGGAGGACGGCAACATCCTGGGGCACAAGC |
| | TGGAGTACAACTACTTTAGCGACAACGTCTATATCACCGCCGACA |
| | AGCAGAAGAACGGCATCAAGGCCAACTTCAAGATCCGCCACAACA |
| | TCGAGGACGGCGGCGTGCAGCTCGCCGACCACTACCAGCAGAACA |
| | CCCCCATCGGCGACGGCCCCGTGCTGCTGCCCGACAACCACTACC |
| | TGAGCACCCAGTCCAAGCTGAGCAAAGACCCCAACGAGAAGCGCG |
| | ATCACATGGTCCTGCTGGAGTTCGTGACCGCCGCCGGGATCACTC |
| | TCGGCATGGACGAGCTGTACAAGTAAAATCAACCTCTGGATTACA |
| | AAATTTGTGAAAGATTGACTGGTATTCTTAACTATGTTGCTCCTT |
| | TTACGCTATGTGGATACGCTGCTTTAATGCCTTTGTATCATGTTA |
| | ACTAAACTTGTTTATTGCAGCTTATAATGGTTACAAATAAAGCAA |
| | TAGCATCACAAATTTCACAAATAAAGCATTTTTTTCACTGCATTC |
| | TAGTTGTGGTTTGTCCAAACTCATCAATGTATCTTATCATGTCTG |
| | GAATTGACTCAAATGATGTCAATTAGTCTATCAGAAGCTCATCTG |
| | GTCTCCCTTCCGGGGGACAAGACATCCCTGTTTAATATTTAAACA |
| | GCAGTGTTCCCAAACTGGGTTCTTATATCCCTTGCTCTGGTCAAC |
| | CAGGTTGCAGGGTTTCCTGTCCTCACAGGAACGAAGTCCCTAAAG |
| | AAACAGTGGCAGCCAGGTTTAGCCCCGGAATTGACTGGATTCCTT |
| | TTTTAGGGCCCATTGGTATGGCTTTTTCCCCGTATCCCCCCAGGT |
| | GTCTGCAGGCTCAAAGAGCAGCGAGAAGCGTTCAGAGGAAAGCGA |
| | TCCCGTGCCACCTTCCCCGTGCCCGGGCTGTCCCCGCACGCTGCC |
| | GGCTCGGGGATGCGGGGGGAGCGCCGGACCGGAGCGGAGCCCCGG |
| | GCGGCTCGCTGCTGCCCCCTAGCGGGGGAGGGACGTAATTACATC |
| | CCTGGGGGCTTTGGGGGGGGGCTGTCCCTGATATCTATAACAAGA |
| | AAATATATATATAATAAGTTATCACGTAAGTAGAACATGAAATAA |
| | CAATATAATTATCGTATGAGTTAAATCTTAAAAGTCACGTAAAAG |
| | ATAATCATGCGTCATTTTGACTCACGCGGTCGTTATAGTTCAAAA |
| | TCAGTGACACTTACCGCATTGACAAGCACGCCTCACGGGAGCTCC |
| | AAGCGGCGACTGAGATGTCCTAAATGCACAGCGACGGATTCGCGC |
| | TATTTAGAAAGAGAGAGCAATATTTCAAGAATGCATGCGTCAATT |
| | TTACGCAGACTATCTTTCTAGGGTTAATCTAGCTGCATCAGGATC |
| | ATATCGTCGGGTCTTTTTTCCGGCTCAGTCATCGCCCAAGCTGGC |
| | GCTATCTGGGCATCGGGGAGGAAGAAGCCCGTGCCTTTTCCCGCG |
| | AGGTTGAAGCGGCATGGAAAGAGTTTGCCGAGGATGACTGCTGCT |
| | GCATTGACGTTGAGCGAAAACGCACGTTTACCATGATGATTCGGG |
| | AAGGTGTGGCCATGCACGCCTTTAACGGTGAACTGTTCGTTCAGG |
| | CCACCTGGGATACCAGTTCGTCGCGGCTTTTCCGGACACAGTTCC |
| | GGATGGTCAGCCCGAAGCGCATCAGCAACCCGAACAATACCGGCG |
| | ACAGCCGGAACTGCCGTGCCGGTGTGCAGATTAATGACAGCGGTG |
| | CGGCGCTGGGATATTACGTCAGCGAGGACGGGTATCCTGGCTGGA |
| | TGCCGCAGAAATGGACATGGATACCCCGTGAGTTACCCGGCGGGC |
| | GCGCTTGGCGTAATCATGGTCATAGCTGTTTCCTGTGTGAAATTG |
| | TTATCCGCTCACAATTCCACACAACATACGAGCCGGAAGCATAAA |
| | GTGTAAAGCCTGGGGTGCCTAATGAGTGAGCTAACTCACATTAAT |
| | TGCGTTGCGCTCACTGCCCGCTTTCCAGTCGGGAAACCTGTCGTG |
| | CCAGCTGCATTAATGAATCGGCCAACGCGCGGGGAGAGGCGGTTT |
| | GCGTATTGGGCGCTCTTCCGCTTCCTCGCTCACTGACTCGCTGCG |
| | CTCGGTCGTTCGGCTGCGGCGAGCGGTATCAGCTCACTCAAAGGC |
| | GGTAATACGGTTATCCACAGAATCAGGGGATAACGCAGGAAAGAA |
| | CATGTGAGCAAAAGGCCAGCAAAAGGCCAGGAACCGTAAAAAGGC |
| | CGCGTTGCTGGCGTTTTTCCATAGGCTCCGCCCCCCTGACGAGCA |
| | TCACAAAAATCGACGCTCAAGTCAGAGGTGGCGAAACCCGACAGG |
| | ACTATAAAGATACCAGGCGTTTCCCCCTGGAAGCTCCCTCGTGCG |
| | CTCTCCTGTTCCGACCCTGCCGCTTACCGGATACCTGTCCGCCTT |
| | TCTCCCTTCGGGAAGCGTGGCGCTTTCTCATAGCTCACGCTGTAG |
| | GTATCTCAGTTCGGTGTAGGTCGTTCGCTCCAAGCTGGGCTGTGT |
| | GCACGAACCCCCCGTTCAGCCCGACCGCTGCGCCTTATCCGGTAA |
| | CTATCGTCTTGAGTCCAACCCGGTAAGACACGACTTATCGCCACT |
| | GGCAGCAGCCACTGGTAACAGGATTAGCAGAGCGAGGTATGTAGG |
| | CGGTGCTACAGAGTTCTTGAAGTGGTGGCCTAACTACGGCTACAC |
| | TAGAAGGACAGTATTTGGTATCTGCGCTCTGCTGAAGCCAGTTAC |
| | CTTCGGAAAAAGAGTTGGTAGCTCTTGATCCGGCAAACAAACCAC |
| | CGCTGGTAGCGGTGGTTTTTTTGTTTGCAAGCAGCAGATTACGCG |
| | CAGAAAAAAAGGATCTCAAGAAGATCCTTTGATCTTTTCTACGGG |
| | GTCTGACGCTCAGTGGAACGAAAACTCACGTTAAGGGATTTTGGT |
| | CATGAGATTATCAAAAAGGATCTTCACCTAGATCCTTTTAAATTA |
| | AAAATGAAGTTTTAAATCAATCTAAAGTATATATGAGTAAACTTG |
| | GTCTGACAGTTACCAATGCTTAATCAGTGAGGCACCTATCTCAGC |
| | GATCTGTCTATTTCGTTCATCCATAGTTGCCTGACTCCCCGTCGT |
| | GTAGATAACTACGATACGGGAGGGCTTACCATCTGGCCCCAGTGC |
| | TGCAATGATACCGCGAGACCCACGCTCACCGGCTCCAGATTTATC |
| | AGCAATAAACCAGCCAGCCGGAAGGGCCGAGCGCAGAAGTGGTCC |
| | TGCAACTTTATCCGCCTCCATCCAGTCTATTAATTGTTGCCGGGA |
| | AGCTAGAGTAAGTAGTTCGCCAGTTAATAGTTTGCGCAACGTTGT |
| | TGCCATTGCTACAGGCATCGTGGTGTCACGCTCGTCGTTTGGTAT |
| | GGCTTCATTCAGCTCCGGTTCCCAACGATCAAGGCGAGTTACATG |
| | ATCCCCCATGTTGTGCAAAAAAGCGGTTAGCTCCTTCGGTCCTCC |
| | GATCGTTGTCAGAAGTAAGTTGGCCGCAGTGTTATCACTCATGGT |
| | TATGGCAGCACTGCATAATTCTCTTACTGTCATGCCATCCGTAAG |
| | ATGCTTTTCTGTGACTGGTGAGTACTCAACCAAGTCATTCTGAGA |
| | ATAGTGTATGCGGCGACCGAGTTGCTCTTGCCCGGCGTCAATACG |
| | GGATAATACCGCGCCACATAGCAGAACTTTAAAAGTGCTCATCAT |
| | TGGAAAACGTTCTTCGGGGCGAAAACTCTCAAGGATCTTACCGCT |
| | GTTGAGATCCAGTTCGATGTAACCCACTCGTGCACCCAACTGATC |
| | TTCAGCATCTTTTACTTTCACCAGCGTTTCTGGGTGAGCAAAAAC |
| | AGGAAGGCAAAATGCCGCAAAAAAGGGAATAAGGGCGACACGGAA |
| | ATGTTGAATACTCAT(SEQ ID NO: 80) |
| PB-TRE-V5- | ACTCTTCCTTTTTCAATATTATTGAAGCATTTATCAGGGTTATTG |
| dCas13b-mut (c - | TCTCATGAGCGGATACATATTTGAATGTATTTAGAAAAATAAACA |
| 4EBP1-pho sMUT) | AATAGGGGTTCCGCGCACATTTCCCCGAAAAGTGCCACCTAAATT |
| EF1a NLS-Turq | GTAAGCGTTAATATTTTGTTAAAATTCGCGTTAAATTTTTGTTAA |
| | ATCAGCTCATTTTTTAACCAATAGGCCGAAATCGGCAAAATCCCT |
| | TATAAATCAAAAGAATAGACCGAGATAGGGTTGAGTGTGTTGCCA |
| | GTTTGGAACAAGAGTCCACTATTAAAGAACGTGGACTCCAACGTC |
| | AAAGGGCGAAAAACCGTCTATCAGGGCGATGGCCCACTACGTGAA |
| | CCATCACCCTAATCAAGTTTTTTGGGGTCGAGGTGCCGTAAAGCA |
| | CTAAATCGGAACCCTAAAGGGAGCCCCCGATTTAGAGCTTGACGG |
| | GGAAAGCCGGCGAACGTGGCGAGAAAGGAAGGGAAGAAAGCGAAA |
| | GGAGCGGGCGCTAGGGCGCTGGCAAGTGTAGCGGTCACGCTGCGC |
| | GTAACCACCACACCCGCCGCGCTTAATGCGCCGCTACAGGGCGCG |
| | TCCCATTCGCCATTCAGGCTGCGCAACTGTTGGGAAGGGCGATCG |
| | GTGCGGGCCTCTTCGCTATTACGCCAGCTGGCGAAAGGGGGATGT |
| | GCTGCAAGGCGATTAAGTTGGGTAACGCCAGGGTTTTCCCAGTCA |
| | CGACGTTGTAAAACGACGGCCAGTGAGCGCGCCTCGTTCATTCAC |
| | GTTTTTGAACCCGTGGAGGACGGGCAGACTCGCGGTGCAAATGTG |
| | TTTTACAGCGTGATGGAGCAGATGAAGATGCTCGACACGCTGCAG |
| | AACACGCAGCTAGATTAACCCTAGAAAGATAATCATATTGTGACG |
| | TACGTTAAAGATAATCATGTGTAAAATTGACGCATGTGTTTTATC |
| | GGTCTGTATATCGAGGTTTATTTATTAATTTGAATAGATATTAAG |
| | TTTTATTATATTTACACTTACATACTAATAATAAATTCAACAAAC |
| | AATTTATTTATGTTTATTTATTTATTAAAAAAAACAAAAACTCAA |
| | AATTTCTTCTATAAAGTAACAAAACTTTTATGAGGGACAGCCCCC |
| | CCCCAAAGCCCCCAGGGATGTAATTACGTCCCTCCCCCGCTAGGG |
| | GGCAGCAGCGAGCCGCCCGGGGCTCCGCTCCGGTCCGGCGCTCCC |
| | CCCGCATCCCCGAGCCGGCAGCGTGCGGGGACAGCCCGGGCACGG |
| | GGAAGGTGGCACGGGATCGCTTTCCTCTGAACGCTTCTCGCTGCT |
| | CTTTGAGCCTGCAGACACCTGGGGGGATACGGGGAAAAGGCCTCC |
| | ACGGCCACTAGTTCTACCGGGTAGGGGAGGCGCTTTTCCCAAGGC |
| | AGTCTGGAGCATGCGCTTTAGCAGCCCCGCTGGGCACTTGGCGCT |
| | ACACAAGTGGCCTCTGGCCTCGCACACATTCCACATCCACCGGTA |
| | GGCGCCAACCGGCTCCGTTCTTTGGTGGCCCCTTCGCGCCACCTT |
| | CTACTCCTCCCCTAGTCAGGAAGTTCCCCCCCGCCCCGCAGCTCG |
| | CGTCGTGCAGGACGTGACAAATGGAAGTAGCACGTCTCATTAGTC |
| | TCGTGCAGATGGACAGCACCGCTGAGCAATGGAAGCGGGTAGGCC |
| | TTTGGGGCAGCGGCCAATAGCAGCTTTGCTCCTTCGCTTTCTGGG |
| | CTCAGAGGCTGGGAAGGGGTGGGTCCGGGGGCGGGCTCAGGGGCG |
| | GGCTCAGGGGCGGGGCGGGCGCCCGAAGGTCCTCCGGAGGCCCGG |
| | CATTCTGCACGCTTCAAAAGCGCACGTCTGCCGCGCTGTTCTCCT |
| | CTTCCTCATCTCCGGGCCTTTCGACCTGCAGGTTAATTAAATGGG |
| | TAAGCCTATCCCTAACCCTCTCCTCGGTCTCGATTCTACGGCTAG |
| | CATGAACATCCCCGCTCTGGTGGAAAACCAGAAGAAGTACTTTGG |
| | CACCTACAGCGTGATGGCCATGCTGAACGCTCAGACCGTGCTGGA |
| | CCACATCCAGAAGGTGGCCGATATTGAGGGCGAGCAGAACGAGAA |
| | CAACGAGAATCTGTGGTTTCACCCCGTGATGAGCCACCTGTACAA |
| | CGCCAAGAACGGCTACGACAAGCAGCCCGAGAAAACCATGTTCAT |
| | CATCGAGCGGCTGCAGAGCTACTTCCCATTCCTGAAGATCATGGC |
| | CGAGAACCAGAGAGAGTACAGCAACGGCAAGTACAAGCAGAACCG |
| | CGTGGAAGTGAACAGCAACGACATCTTCGAGGTGCTGAAGCGCGC |
| | CTTCGGCGTGCTGAAGATGTACAGGGACCTGACCAACGCATACAA |
| | GACCTACGAGGAAAAGCTGAACGACGGCTGCGAGTTCCTGACCAG |
| | CACAGAGCAACCTCTGAGCGGCATGATCAACAACTACTACACAGT |
| | GGCCCTGCGGAACATGAACGAGAGATACGGCTACAAGACAGAGGA |
| | CCTGGCCTTCATCCAGGACAAGCGGTTCAAGTTCGTGAAGGACGC |
| | CTACGGCAAGAAAAAGTCCCAAGTGAATACCGGATTCTTCCTGAG |
| | CCTGCAGGACTACAACGGCGACACACAGAAGAAGCTGCACCTGAG |
| | CGGAGTGGGAATCGCCCTGCTGATCTGCCTGTTCCTGGACAAGCA |
| | GTACATCAACATCTTTCTGAGCAGGCTGCCCATCTTCTCCAGCTA |
| | CAATGCCCAGAGCGAGGAACGGCGGATCATCATCAGATCCTTCGG |
| | CATCAACAGCATCAAGCTGCCCAAGGACCGGATCCACAGCGAGAA |
| | GTCCAACAAGAGCGTGGCCATGGATATGCTCAACGAAGTGAAGCG |
| | GTGCCCCGACGAGCTGTTCACAACACTGTCTGCCGAGAAGCAGTC |
| | CCGGTTCAGAATCATCAGCGACGACCACAATGAAGTGCTGATGAA |
| | GCGGAGCAGCGACAGATTCGTGCCTCTGCTGCTGCAGTATATCGA |
| | TTACGGCAAGCTGTTCGACCACATCAGGTTCCACGTGAACATGGG |
| | CAAGCTGAGATACCTGCTGAAGGCCGACAAGACCTGCATCGACGG |
| | CCAGACCAGAGTCAGAGTGATCGAGCAGCCCCTGAACGGCTTCGG |
| | CAGACTGGAAGAGGCCGAGACAATGCGGAAGCAAGAGAACGGCAC |
| | CTTCGGCAACAGCGGCATCCGGATCAGAGACTTCGAGAACATGAA |
| | GCGGGACGACGCCAATCCTGCCAACTATCCCTACATCGTGGACAC |
| | CTACACACACTACATCCTGGAAAACAACAAGGTCGAGATGTTTAT |
| | CAACGACAAAGAGGACAGCGCCCCACTGCTGCCCGTGATCGAGGA |
| | TGATAGATACGTGGTCAAGACAATCCCCAGCTGCCGGATGAGCAC |
| | CCTGGAAATTCCAGCCATGGCCTTCCACATGTTTCTGTTCGGCAG |
| | CAAGAAAACCGAGAAGCTGATCGTGGACGTGCACAACCGGTACAA |
| | GAGACTGTTCCAGGCCATGCAGAAAGAAGAAGTGACCGCCGAGAA |
| | TATCGCCAGCTTCGGAATCGCCGAGAGCGACCTGCCTCAGAAGAT |
| | CCTGGATCTGATCAGCGGCAATGCCCACGGCAAGGATGTGGACGC |
| | CTTCATCAGACTGACCGTGGACGACATGCTGACCGACACCGAGCG |
| | GAGAATCAAGAGATTCAAGGACGACCGGAAGTCCATTCGGAGCGC |
| | CGACAACAAGATGGGAAAGAGAGGCTTCAAGCAGATCTCCACAGG |
| | CAAGCTGGCCGACTTCCTGGCCAAGGACATCGTGCTGTTTCAGCC |
| | CAGCGTGAACGATGGCGAGAACAAGATCACCGGCCTGAACTACCG |
| | GATCATGCAGAGCGCCATTGCCGTGTACGATAGCGGCGACGATTA |
| | CGAGGCCAAGCAGCAGTTCAAGCTGATGTTCGAGAAGGCCCGGCT |
| | GATCGGCAAGGGCACAACAGAGCCTCATCCATTTCTGTACAAGGT |
| | GTTCGCCCGCAGCATCCCCGCCAATGCCGTCGAGTTCTACGAGCG |
| | CTACCTGATCGAGCGGAAGTTCTACCTGACCGGCCTGTCCAACGA |
| | GATCAAGAAAGGCAACAGAGTGGATGTGCCCTTCATCCGGCGGGA |
| | CCAGAACAAGTGGAAAACACCCGCCATGAAGACCCTGGGCAGAAT |
| | CTACAGCGAGGATCTGCCCGTGGAACTGCCCAGACAGATGTTCGA |
| | CAATGAGATCAAGTCCCACCTGAAGTCCCTGCCACAGATGGAAGG |
| | CATCGACTTCAACAATGCCAACGTGACCTATCTGATCGCCGAGTA |
| | CATGAAGAGAGTGCTGGACGACGACTTCCAGACCTTCTACCAGTG |
| | GAACCGCAACTACCGGTACATGGACATGCTTAAGGGCGAGTACGA |
| | CAGAAAGGGCTCCCTGCAGCACTGCTTCACCAGCGTGGAAGAGAG |
| | AGAAGGCCTCTGGAAAGAGCGGGCCTCCAGAACAGAGCGGTACAG |
| | AAAGCAGGCCAGCAACAAGATCCGCAGCAACCGGCAGATGAGAAA |
| | CGCCAGCAGCGAAGAGATCGAGACAATCCTGGATAAGCGGCTGAG |
| | CAACAGCCGGAACGAGTACCAGAAAAGCGAGAAAGTGATCCGGCG |
| | CTACAGAGTGCAGGATGCCCTGCTGTTTCTGCTGGCCAAAAAGAC |
| | CCTGACCGAACTGGCCGATTTCGACGGCGAGAGGTTCAAACTGAA |
| | AGAAATCATGCCCGACGCCGAGAAGGGAATCCTGAGCGAGATCAT |
| | GCCCATGAGCTTCACCTTCGAGAAAGGCGGCAAGAAGTACACCAT |
| | CACCAGCGAGGGCATGAAGCTGAAGAACTACGGCGACTTCTTTGT |
| | GCTGGCTAGCGACAAGAGGATCGGCAACCTGCTGGAACTCGTGGG |
| | CAGCGACATCGTGTCCAAAGAGGATATCATGGAAGAGTTCAACAA |
| | ATACGACCAGTGCAGGCCCGAGATCAGCTCCATCGTGTTCAACCT |
| | GGAAAAGTGGGCCTTCGACACATACCCCGAGCTGTCTGCCAGAGT |
| | GGACCGGGAAGAGAAGGTGGACTTCAAGAGCATCCTGAAAATCCT |
| | GCTGAACAACAAGAACATCAACAAAGAGCAGAGCGACATCCTGCG |
| | GAAGATCCGGAACGCCTTCGATGCAAACAATTACCCCGACAAAGG |
| | CGTGGTGGAAATCAAGGCCCTGCCTGAGATCGCCATGAGCATCAA |
| | GAAGGCCTTTGGGGAGTACGCCATCATGAAGCTCGAGGGCGGATC |
| | CGGTGGTTCCGGAGGAGCTGTCGACATGTCCGGGGGCAGCAGCTG |
| | CAGCCAGACCCCAAGCGCTGCCGCAGCCGCCACTCGCCGGGTGGT |
| | GCTCGGCGCCGGCGTGCAGCTCCCGCCCGGGGACTACAGCACGGC |
| | CCCCGGCGGCACGCTCTTCAGCACCGCCCCGGGAGGTACCAGGAT |
| | CATCTATGACCGGAAATTCCTGATGGAGTGTCGGAACGCACCTGT |
| | GACCAAAGCACCCCCAAGGGATCTGCCCACCATTCCGGGGGTCAC |
| | CAGCCCTTCCAGTGATGAGCCCCCCATGGAAGCCAGCCAGAGCCA |
| | CCTGCGCAATAGCCCAGAAGATAAGCGGGCGGGCGGTGAAGAGTC |
| | ACAGGCTGAGATGGACATTTCTAGACTTAAGTAAGCCTCGACTGT |
| | GCCTTCTAGTTGCCAGCCATCTGTTGTTTGCCCCTCCCCCGTGCC |
| | TTCCTTGACCCTGGAAGGTGCCACTCCCACTGTCCTTTCCTAATA |
| | AAATGAGGAAATTGCATCGCATTGTCTGAGTAGGTGTCATTCTAT |
| | TCTGGGGGGTGGGGTGGGGCAGGACAGCAAGGGGGAGGATTGGGA |
| | AGACAATAGCAGGCATGCTGGGGAGTGCCCGTCAGTGGGCAGAGC |
| | GCACATCGCCCACAGTCCCCGAGAAGTTGGGGGGAGGGGTCGGCA |
| | ATTGAACGGGTGCCTAGAGAAGGTGGCGCGGGGTAAACTGGGAAA |
| | GTGATGTCGTGTACTGGCTCCGCCTTTTTCCCGAGGGTGGGGGAG |
| | AACCGTATATAAGTGCAGTAGTCGCCGTGAACGTTCTTTTTCGCA |
| | ACGGGTTTGCCGCCAGAACACAGATGGTCTCTAAAGGAGGTTCGT |
| | CCGACGACGAAGCAACAGCGGACTCGCAGCACGCCGCACCTCCTA |
| | AGAAGAAAAGGAAGGTAGGGGATCCCCGGGTACCGGTCGCCACCA |
| | TGGTGAGCAAGGGCGAGGAGCTGTTCACCGGGGTGGTGCCCATCC |
| | TGGTCGAGCTGGACGGCGACGTAAACGGCCACAAGTTCAGCGTGT |
| | CCGGCGAGGGCGAGGGCGATGCCACCTACGGCAAGCTGACCCTGA |
| | AGTTCATCTGCACCACCGGCAAGCTGCCCGTGCCCTGGCCCACCC |
| | TCGTGACCACCCTGTCCTGGGGCGTGCAGTGCTTCGCCCGCTACC |
| | CCGACCACATGAAGCAGCACGACTTCTTCAAGTCCGCCATGCCCG |
| | AAGGCTACGTCCAGGAGCGCACCATCTTCTTCAAGGACGACGGCA |
| | ACTACAAGACCCGCGCCGAGGTGAAGTTCGAGGGCGACACCCTGG |
| | TGAACCGCATCGAGCTGAAGGGCATCGACTTCAAGGAGGACGGCA |
| | ACATCCTGGGGCACAAGCTGGAGTACAACTACTTTAGCGACAACG |
| | TCTATATCACCGCCGACAAGCAGAAGAACGGCATCAAGGCCAACT |
| | TCAAGATCCGCCACAACATCGAGGACGGCGGCGTGCAGCTCGCCG |
| | ACCACTACCAGCAGAACACCCCCATCGGCGACGGCCCCGTGCTGC |
| | TGCCCGACAACCACTACCTGAGCACCCAGTCCAAGCTGAGCAAAG |
| | ACCCCAACGAGAAGCGCGATCACATGGTCCTGCTGGAGTTCGTGA |
| | CCGCCGCCGGGATCACTCTCGGCATGGACGAGCTGTACAAGTAAA |
| | ATCAACCTCTGGATTACAAAATTTGTGAAAGATTGACTGGTATTC |
| | TTAACTATGTTGCTCCTTTTACGCTATGTGGATACGCTGCTTTAA |
| | TCGGTTTGTATCATGTTAACTAAACTTGTTTATTGCAGCTTATAA |
| | TGGTTACAAATAAAGCAATAGCATCACAAATTTCACAAATAAAGC |
| | ATTTTTTTCACTGCATTCTAGTTGTGGTTTGTCCAAACTCATCAA |
| | TGTATCTTATCATGTCTGGAATTGACTCAAATGATGTCAATTAGT |
| | CTATCAGAAGCTCATCTGGTCTCCCTTCCGGGGGACAAGACATCC |
| | CTGTTTAATATTTAAACAGCAGTGTTCCCAAACTGGGTTCTTATA |
| | TCCCTTGCTCTGGTCAACCAGGTTGCAGGGTTTCCTGTCCTCACA |
| | GGAACGAAGTCCCTAAAGAAACAGTGGCAGCCAGGTTTAGCCCCG |
| | GAATTGACTGGATTCCTTTTTTAGGGCCCATTGGTATGGCTTTTT |
| | CCCCGTATCCCCCCAGGTGTCTGCAGGCTCAAAGAGCAGCGAGAA |
| | GCGTTCAGAGGAAAGCGATCCCGTGCCACCTTCCCCGTGCCCGGG |
| | CTGTCCCCGCACGCTGCCGGCTCGGGGATGCGGGGGGAGCGCCGG |
| | ACCGGAGCGGAGCCCCGGGCGGCTCGCTGCTGCCCCCTAGCGGGG |
| | GAGGGACGTAATTACATCCCTGGGGGCTTTGGGGGGGGGCTGTCC |
| | CTGATATCTATAACAAGAAAATATATATATAATAAGTTATCACGT |
| | AAGTAGAACATGAAATAACAATATAATTATCGTATGAGTTAAATC |
| | TTAAAAGTCACGTAAAAGATAATCATGCGTCATTTTGACTCACGC |
| | GGTCGTTATAGTTCAAAATCAGTGACACTTACCGCATTGACAAGC |
| | ACGCCTCACGGGAGCTCCAAGCGGCGACTGAGATGTCCTAAATGC |
| | ACAGCGACGGATTCGCGCTATTTAGAAAGAGAGAGCAATATTTCA |
| | AGAATGCATGCGTCAATTTTACGCAGACTATCTTTCTAGGGTTAA |
| | TCTAGCTGCATCAGGATCATATCGTCGGGTCTTTTTTCCGGCTCA |
| | GTCATCGCCCAAGCTGGCGCTATCTGGGCATCGGGGAGGAAGAAG |
| | CCCGTGCCTTTTCCCGCGAGGTTGAAGCGGCATGGAAAGAGTTTG |
| | CCGAGGATGACTGCTGCTGCATTGACGTTGAGCGAAAACGCACGT |
| | TTACCATGATGATTCGGGAAGGTGTGGCCATGCACGCCTTTAACG |
| | GTGAACTGTTCGTTCAGGCCACCTGGGATACCAGTTCGTCGCGGC |
| | TTTTCCGGACACAGTTCCGGATGGTCAGCCCGAAGCGCATCAGCA |
| | ACCCGAACAATACCGGCGACAGCCGGAACTGCCGTGCCGGTGTGC |
| | AGATTAATGACAGCGGTGCGGCGCTGGGATATTACGTCAGCGAGG |
| | ACGGGTATCCTGGCTGGATGCCGCAGAAATGGACATGGATACCCC |
| | GTGAGTTACCCGGCGGGCGCGCTTGGCGTAATCATGGTCATAGCT |
| | GTTTCCTGTGTGAAATTGTTATCCGCTCACAATTCCACACAACAT |
| | ACGAGCCGGAAGCATAAAGTGTAAAGCCTGGGGTGCCTAATGAGT |
| | GAGCTAACTCACATTAATTGCGTTGCGCTCACTGCCCGCTTTCCA |
| | GTCGGGAAACCTGTCGTGCCAGCTGCATTAATGAATCGGCCAACG |
| | CGCGGGGAGAGGCGGTTTGCGTATTGGGCGCTCTTCCGCTTCCTC |
| | GCTCACTGACTCGCTGCGCTCGGTCGTTCGGCTGCGGCGAGCGGT |
| | ATCAGCTCACTCAAAGGCGGTAATACGGTTATCCACAGAATCAGG |
| | GGATAACGCAGGAAAGAACATGTGAGCAAAAGGCCAGCAAAAGGC |
| | CAGGAACCGTAAAAAGGCCGCGTTGCTGGCGTTTTTCCATAGGCT |
| | CCGCCCCCCTGACGAGCATCACAAAAATCGACGCTCAAGTCAGAG |
| | GTGGCGAAACCCGACAGGACTATAAAGATACCAGGCGTTTCCCCC |
| | TGGAAGCTCCCTCGTGCGCTCTCCTGTTCCGACCCTGCCGCTTAC |
| | CGGATACCTGTCCGCCTTTCTCCCTTCGGGAAGCGTGGCGCTTTC |
| | TCATAGCTCACGCTGTAGGTATCTCAGTTCGGTGTAGGTCGTTCG |
| | CTCCAAGCTGGGCTGTGTGCACGAACCCCCCGTTCAGCCCGACCG |
| | CTGCGCCTTATCCGGTAACTATCGTCTTGAGTCCAACCCGGTAAG |
| | ACACGACTTATCGCCACTGGCAGCAGCCACTGGTAACAGGATTAG |
| | CAGAGCGAGGTATGTAGGCGGTGCTACAGAGTTCTTGAAGTGGTG |
| | GCCTAACTACGGCTACACTAGAAGGACAGTATTTGGTATCTGCGC |
| | TCTGCTGAAGCCAGTTACCTTCGGAAAAAGAGTTGGTAGCTCTTG |
| | ATCCGGCAAACAAACCACCGCTGGTAGCGGTGGTTTTTTTGTTTG |
| | CAAGCAGCAGATTACGCGCAGAAAAAAAGGATCTCAAGAAGATCC |
| | TTTGATCTTTTCTACGGGGTCTGACGCTCAGTGGAACGAAAACTC |
| | ACGTTAAGGGATTTTGGTCATGAGATTATCAAAAAGGATCTTCAC |
| | CTAGATCCTTTTAAATTAAAAATGAAGTTTTAAATCAATCTAAAG |
| | TATATATGAGTAAACTTGGTCTGACAGTTACCAATGCTTAATCAG |
| | TGAGGCACCTATCTCAGCGATCTGTCTATTTCGTTCATCCATAGT |
| | TGCCTGACTCCCCGTCGTGTAGATAACTACGATACGGGAGGGCTT |
| | ACCATCTGGCCCCAGTGCTGCAATGATACCGCGAGACCCACGCTC |
| | ACCGGCTCCAGATTTATCAGCAATAAACCAGCCAGCCGGAAGGGC |
| | CGAGCGCAGAAGTGGTCCTGCAACTTTATCCGCCTCCATCCAGTC |
| | TATTAATTGTTGCCGGGAAGCTAGAGTAAGTAGTTCGCCAGTTAA |
| | TAGTTTGCGCAACGTTGTTGCCATTGCTACAGGCATCGTGGTGTC |
| | ACGCTCGTCGTTTGGTATGGCTTCATTCAGCTCCGGTTCCCAACG |
| | ATCAAGGCGAGTTACATGATCCCCCATGTTGTGCAAAAAAGCGGT |
| | TAGCTCCTTCGGTCCTCCGATCGTTGTCAGAAGTAAGTTGGCCGC |
| | AGTGTTATCACTCATGGTTATGGCAGCACTGCATAATTCTCTTAC |
| | TGTCATGCCATCCGTAAGATGCTTTTCTGTGACTGGTGAGTACTC |
| | AACCAAGTCATTCTGAGAATAGTGTATGCGGCGACCGAGTTGCTC |
| | TTGCCCGGCGTCAATACGGGATAATACCGCGCCACATAGCAGAAC |
| | TTTAAAAGTGCTCATCATTGGAAAACGTTCTTCGGGGCGAAAACT |
| | CTCAAGGATCTTACCGCTGTTGAGATCCAGTTCGATGTAACCCAC |
| | TCGTGCACCCAACTGATCTTCAGCATCTTTTACTTTCACCAGCGT |
| | TTCTGGGTGAGCAAAAACAGGAAGGCAAAATGCCGCAAAAAAGGG |
| | AATAAGGGCGACACGGAAATGTTGAATACTCAT (SEQ ID NO: |
| | 81) |
| PB-TRE-H2B- | ACTCTTCCTTTTTCAATATTATTGAAGCATTTATCAGGGTTATTG |
| Citrine- | TCTCATGAGCGGATACATATTTGAATGTATTTAGAAAAATAAACA |
| (Mod.SDHA_Lambda2)- | AATAGGGGTTCCGCGCACATTTCCCCGAAAAGTGCCACCTAAATT |
| EF1a-Puro- | GTAAGCGTTAATATTTTGTTAAAATTCGCGTTAAATTTTTGTTAA |
| rtTA-Cherry + U6- | ATCAGCTCATTTTTTAACCAATAGGCCGAAATCGGCAAAATCCCT |
| sgLUC | TATAAATCAAAAGAATAGACCGAGATAGGGTTGAGTGTTGTTCCA |
| | GTTTGGAACAAGAGTCCACTATTAAAGAACGTGGACTCCAACGTC |
| | AAAGGGCGAAAAACCGTCTATCAGGGCGATGGCCCACTACGTGAA |
| | CCATCACCCTAATCAAGTTTTTTGGGGTCGAGGTGCCGTAAAGCA |
| | CTAAATCGGAACCCTAAAGGGAGCCCCCGATTTAGAGCTTGACGG |
| | GGAAAGCCGGCGAACGTGGCGAGAAAGGAAGGGAAGAAAGCGAAA |
| | GGAGCGGGCGCTAGGGCGCTGGCAAGTGTAGCGGTCACGCTGCGC |
| | GTAACCACCACACCCGCCGCGCTTAATGCGCCGCTACAGGGCGCG |
| | TCCCATTCGCCATTCAGGCTGCGCAACTGTTGGGAAGGGCGATCG |
| | GTGCGGGCCTCTTCGCTATTACGCCAGCTGGCGAAAGGGGGATGT |
| | GCTGCAAGGCGATTAAGTTGGGTAACGCCAGGGTTTTCCCAGTCA |
| | CGACGTTGTAAAACGACGGCCAGTGAGCGCGCCTCGTTCATTCAC |
| | GTTTTTGAACCCGTGGAGGACGGGCAGACTCGCGGTGCAAATGTG |
| | TTTTACAGCGTGATGGAGCAGATGAAGATGCTCGACACGCTGCAG |
| | AACACGCAGCTAGATTAACCCTAGAAAGATAATCATATTGTGACG |
| | TACGTTAAAGATAATCATGTGTAAAATTGACGCATGTGTTTTATC |
| | GGTCTGTATATCGAGGTTTATTTATTAATTTGAATAGATATATAG |
| | TTTTATTATATTTACACTTACATACTAATAATAAATTCAACAAAC |
| | AATTTATTTATGTTTATTTATTTATTAAAAAAAACAAAAACTCAA |
| | AATTTCTTCTATAAAGTAACAAAACTTTTATGAGGGACAGCCCCC |
| | CCCCAAAGCCCCCAGGGATGTAATTACGTCCCTCCCCCGCTAGGG |
| | GGCAGCAGCGAGCCGCCCGGGGCTCCGCTCCGGTCCGGCGCTCCC |
| | CCCGCATCCCCGAGCCGGCAGCGTGCGGGGACAGCCCGGGCACGG |
| | GGAAGGTGGCACGGGATCGCTTTCCTCTGAACGCTTCTCGCTGCT |
| | CTTTGAGCCTGCAGACACCTGGGGGGATACGGGGAAAAGGCCTCC |
| | ACGGCCAAAAAAAGCACCGACTCGGTGCCACTTTTTCAAGTTGAT |
| | AACGGACTAGCCTTATTTAAACTTGCTATGCTGTTTCCAGCATAG |
| | CTCTTAAACATTCTTACGCTGAGTACTTCGGTGTTTCGTCCTTTC |
| | CACAAGATATATAAAGCCAAGAAATCGAAATACTTTCAAGTTACG |
| | GTAAGCATATGATAGTCCATTTTAAAACATAATTTTAAAACTGCA |
| | AACTACCCAAGAAATTATTACTTTCTACGTCACGTATTTTGTACT |
| | AATATCTTTGTGTTTACAGTCAAATTAATTCTAATTATCTCTCTA |
| | ACAGCCTTGTATCGTATATGCAAATATGAAGGAATCATGGGAAAT |
| | AGGCCCTCTTCCTGCCCGACCTGACTAGTACTTTCACTTTTCTCT |
| | ATCACTGATAGGGAGTGGTAAACTCGACTTTCACTTTTCTCTATC |
| | ACTGATAGGGAGTGGTAAACTCGACTTTCACTTTTCTCTATCACT |
| | GATAGGGAGTGGTAAACTCGACTTTCACTTTTCTCTATCACTGAT |
| | AGGGAGTGGTAAACTCGACTTTCACTTTTCTCTATCACTGATAGG |
| | GAGTGGTAAACTCGACTTTCACTTTTCTCTATCACTGATAGGGAG |
| | TGGTAAACTCGACTTTCACTTTTCTCTATCACTGATAGGGAGTGG |
| | TAAACTCGACCTATATAAGCAGAGCTCGTTTAGTGAACCGTCAGA |
| | TCGCCTGGAGACGCCATCCACGCTGTTTTGACCTCCATAGAAGAC |
| | ACCGGGACCGATCCAGCCTCCGCGGCCCCGAATTCATGCCAGAGC |
| | CAGCGAAGTCTGCTCCCGCCCCGAAAAAGGGCTCCAAGAAGGCGG |
| | TGACTAAGGCGCAGAAGAAAGGCGGCAAGAAGCGCAAGCGCAGCC |
| | GCAAGGAGAGCTATTCCATCTATGTGTACAAGGTTCTGAAGCAGG |
| | TCCACCCTGACACCGGCATTTCGTCCAAGGCCATGGGCATCATGA |
| | ATTCGTTTGTGAACGACATTTTCGAGCGCATCGCAGGTGAGGCTT |
| | CCCGCCTGGCGCATTACAACAAGCGCTCGACCATCACCTCCAGGG |
| | AGATCCAGACGGCCGTGCGCCTGCTGCTGCCTGGGGAGTTGGCCA |
| | AGCACGCCGTGTCCGAGGGTACTAAGGCCATCACCAAGTACACCA |
| | GCGCTAAGGATCCCCGGGTACCGGTCGCCACCATGGTGAGCAAGG |
| | GCGAGGAGCTGTTCACCGGGGTGGTGCCCATCCTGGTCGAGCTGG |
| | ACGGCGACGTAAACGGCCACAAGTTCAGCGTGTCCGGCGAGGGCG |
| | AGGGCGATGCCACCTACGGCAAGCTGACCCTGAAGTTCATCTGCA |
| | CCACCGGCAAGCTGCCCGTGCCCTGGCCCACCCTCGTGACCACCT |
| | TCGGCTACGGCCTGATGTGCTTCGCCCGCTACCCCGACCACATGA |
| | AGCAGCACGACTTCTTCAAGTCCGCCATGCCCGAAGGCTACGTCC |
| | AGGAGCGCACCATCTTCTTCAAGGACGACGGCAACTACAAGACCC |
| | GCGCCGAGGTGAAGTTCGAGGGCGACACCCTGGTGAACCGCATCG |
| | AGCTGAAGGGCATCGACTTCAAGGAGGACGGCAACATCCTGGGGC |
| | ACAAGCTGGAGTACAACTACAACAGCCACAACGTCTATATCATGG |
| | CCGACAAGCAGAAGAACGGCATCAAGGTGAACTTCAAGATCCGCC |
| | ACAACATCGAGGACGGCAGCGTGCAGCTCGCCGACCACTACCAGC |
| | AGAACACCCCCATCGGCGACGGCCCCGTGCTGCTGCCCGACAACC |
| | ACTACCTGAGCTACCAGTCCGCCCTGAGCAAAGACCCCAACGAGA |
| | AGCGCGATCACATGGTCCTGCTGGAGTTCGTGACCGCCGCCGGGA |
| | TCACTCTCGGCATGGACGAGCTGTACAAGTAATCTAGAGCTAGCG |
| | CATATGTCCACTTAAGGGCGCTGACATGCGCATGTGAGGATCAAT |
| | TCTTACGCTGAGTACTTCGATTCCTCAAATAGCAAGACAGCCCAC |
| | ATGGCATTCCACTTATCACTGGCATCCTAGATCTGATAGCTTTGT |
| | TCTCAAAGTCTCGAGAAATTCGAATTTAAATCGGCCTCGACTGTG |
| | CCTTCTAGTTGCCAGCCATCTGTTGTTTGCCCCTCCCCCGTGCCT |
| | TCCTTGACCCTGGAAGGTGCCACTCCCACTGTCCTTTCCTAATAA |
| | AATGAGGAAATTGCATCGCATTGTCTGAGTAGGTGTCATTCTATT |
| | CTGGGGGGTGGGGTGGGGCAGGACAGCAAGGGGGAGGATTGGGAA |
| | GACAATAGCAGGCATGCTGGGGACGCGGCCGCGAAGGATCTGCGA |
| | TCGCTCCGGTGCCCGTCAGTGGGCAGAGCGCACATCGCCCACAGT |
| | CCCCGAGAAGTTGGGGGGAGGGGTCGGCAATTGAACGGGTGCCTA |
| | GAGAAGGTGGCGCGGGGTAAACTGGGAAAGTGATGTCGTGTACTG |
| | GCTCCGCCTTTTTCCCGAGGGTGGGGGAGAACCGTATATAAGTGC |
| | AGTAGTCGCCGTGAACGTTCTTTTTCGCAACGGGTTTGCCGCCAG |
| | AACACAGCTGAAGCTTCGAGGGGCTCGCATCTCTCCTTCACGCGC |
| | CCGCCGCCCTACCTGAGGCCGCCATCCACGCCGGTTGAGTCGCGT |
| | TCTGCCGCCTCCCGCCTGTGGTGCCTCCTGAACTGCGTCCGCCGT |
| | CTAGGTAAGTTTAAAGCTCAGGTCGAGACCGGGCCTTTGTCCGGC |
| | GCTCCCTTGGAGCCTACCTAGACTCAGCCGGCTCTCCACGCTTTG |
| | CCTGACCCTGCTTGCTCAACTCTACGTCTTTGTTTCGTTTTCTGT |
| | TCTGCGCCGTTACAGATCCAAGCTGTGACCGGCGCCTACGCTAGA |
| | TGACCGAGTACAAGCCCACGGTGCGCCTCGCCACCCGCGACGACG |
| | TCCCCAGGGCCGTACGCACCCTCGCCGCCGCGTTCGCCGACTACC |
| | CCGCCACGCGCCACACCGTCGATCCGGACCGCCACATCGAGCGGG |
| | TCACCGAGCTGCAAGAACTCTTCCTCACGCGCGTCGGGCTCGACA |
| | TCGGCAAGGTGTGGGTCGCGGACGACGGCGCCGCGGTGGCGGTCT |
| | GGACCACGCCGGAGAGCGTCGAAGCGGGGGCGGTGTTCGCCGAGA |
| | TCGGCCCGCGCATGGCCGAGTTGAGCGGTTCCCGGCTGGCCGCGC |
| | AGCAACAGATGGAAGGCCTCCTGGCGCCGCACCGGCCCAAGGAGC |
| | CCGCGTGGTTCCTGGCCACCGTCGGCGTCTCGCCCGACCACCAGG |
| | GCAAGGGTCTGGGCAGCGCCGTCGTGCTCCCCGGAGTGGAGGCGG |
| | CCGAGCGCGCCGGGGTGCCCGCCTTCCTGGAGACCTCCGCGCCCC |
| | GCAACCTCCCCTTCTACGAGCGGCTCGGCTTCACCGTCACCGCCG |
| | ACGTCGAGGTGCCCGAAGGACCGCGCACCTGGTGCATGACCCGCA |
| | AGCCCGGTGCCGGAAGCGGAGCTACTAACTTCAGCCTGCTGAAGC |
| | AGGCTGGAGACGTGGAGGAGAACCCTGGACCTATGTCTAGACTGG |
| | ACAAGAGCAAAGTCATAAACGGCGCTCTGGAATTACTCAATGGAG |
| | TCGGTATCGAAGGCCTGACGACAAGGAAACTCGCTCAAAAGCTGG |
| | GAGTTGAGCAGCCTACCCTGTACTGGCACGTGAAGAACAAGCGGG |
| | CCCTGCTCGATGCCCTGCCAATCGAGATGCTGGACAGGCATCATA |
| | CCCACTTCTGCCCCCTGGAAGGCGAGTCATGGCAAGACTTTCTGC |
| | GGAACAACGCCAAGTCATTCCGCTGTGCTCTCCTCTCACATCGCG |
| | ACGGGGCTAAAGTGCATCTCGGCACCCGCCCAACAGAGAAACAGT |
| | ACGAAACCCTGGAAAATCAGCTCGCGTTCCTGTGTCAGCAAGGCT |
| | TCTCCCTGGAGAACGCACTGTACGCTCTGTCCGCCGTGGGCCACT |
| | TTACACTGGGCTGCGTATTGGAGGAACAGGAGCATCAAGTAGCAA |
| | AAGAGGAAAGAGAGACACCTACCACCGATTCTATGCCCCCACTTC |
| | TGAGACAAGCAATTGAGCTGTTCGACCGGCAGGGAGCCGAACCTG |
| | CCTTCCTTTTCGGCCTGGAACTAATCATATGTGGCCTGGAGAAAC |
| | AGCTAAAGTGCGAAAGCGGCGGGCCGGCCGACGCCCTTGACGATT |
| | TTGACTTAGACATGCTCCCAGCCGATGCCCTTGACGACTTTGACC |
| | TTGATATGCTGCCTGCTGACGCTCTTGACGATTTTGACCTTGACA |
| | TGCTCCCCGGGTAACTAAGTAACCCTCTCCCTCCCCCCCCCCTAA |
| | CGTTACTGGCCGAAGCCGCTTGGAATAAGGCCGGTGTGCGTTTGT |
| | CTATATGTTATTTTCCACCATATTGCCGTCTTTTGGCAATGTGAG |
| | GGCCCGGAAACCTGGCCCTGTCTTCTTGACGAGCATTCCTAGGGG |
| | TCTTTCCCCTCTCGCCAAAGGAATGCAAGGTCTGTTGAATGTCGT |
| | GAAGGAAGCAGTTCCTCTGGAAGCTTCTTGAAGACAAACAACGTC |
| | TGTAGCGACCCTTTGCAGGCAGCGGAACCCCCCACCTGGCGACAG |
| | GTGCCTCTGCGGCCAAAAGCCACGTGTATAAGATACACCTGCAAA |
| | GGCGGCACAACCCCAGTGCCACGTTGTGAGTTGGATAGTTGTGGA |
| | AAGAGTCAAATGGCTCTCCTCAAGCGTATTCAACAAGGGGCTGAA |
| | GGATGCCCAGAAGGTACCCCATTGTATGGGATCTGATCTGGGGCC |
| | TCGGTGCACATGCTTTACATGTGTTTAGTCGAGGTTAAAAAAACG |
| | TCTAGGCCCCCCGAACCACGGGGACGTGGTTTTCCTTTGAAAAAC |
| | ACGATGATAATATGGCCACAACCATGGTCTCTAAAGGAGGTTCGT |
| | CCGACGACGAAGCAACAGCGGACTCGCAGCACGCCGCACCTCCTA |
| | AGAAGAAAAGGAAGGTAGGGGATCCCCGGGTACCGGTCGCCACCA |
| | TGGCCATCATCAAGGAGTTCATGCGCTTCAAGGTGCACATGGAGG |
| | GCTCCGTGAACGGCCACGAGTTCGAGATCGAGGGCGAGGGCGAGG |
| | GCCGCCCCTACGAGGGCACCCAGACCGCCAAGCTGAAGGTGACCA |
| | AGGGTGGCCCCCTGCCCTTCGCCTGGGACATCCTGTCCCCTCAGT |
| | TCATGTACGGCTCCAAGGCCTACGTGAAGCACCCCGCCGACATCC |
| | CCGACTACTTGAAGCTGTCCTTCCCCGAGGGCTTCAAGTGGGAGC |
| | GCGTGATGAACTTCGAGGACGGCGGCGTGGTGACCGTGACCCAGG |
| | ACTCCTCCCTGCAGGACGGCGAGTTCATCTACAAGGTGAAGCTGC |
| | GCGGCACCAACTTCCCCTCCGACGGCCCCGTAATGCAGAAGAAGA |
| | CCATGGGCTGGGAGGCCTCCTCCGAGCGGATGTACCCCGAGGACG |
| | GCGCCCTGAAGGGCGAGATCAAGCAGAGGCTGAAGCTGAAGGACG |
| | GCGGCCACTACGACGCTGAGGTCAAGACCACCTACAAGGCCAAGA |
| | AGCCCGTGCAGCTGCCCGGCGCCTACAACGTCAACATCAAGTTGG |
| | ACATCACCTCCCACAACGAGGACTACACCATCGTGGAACAGTACG |
| | AACGCGCCGAGGGCCGCCACTCCACCGGCGGCATGGACGAGCTGT |
| | ACAAGTAAAATCAACCTCTGGATTACAAAATTTGTGAAAGATTGA |
| | CTGGTATTCTTAACTATGTTGCTCCTTTTACGCTATGTGGATACG |
| | CTGCTTTAATGCCTTTGTATCATGCGTTAACTAAACTTGTTTATT |
| | GCAGCTTATAATGGTTACAAATAAAGCAATAGCATCACAAATTTC |
| | ACAAATAAAGCATTTTTTTCACTGCATTCTAGTTGTGGTTTGTCC |
| | AAACTCATCAATGTATCTTATCATGTCTGGAATTGACTCAAATGA |
| | TGTCAATTAGTCTATCAGAAGCTCATCTGGTCTCCCTTCCGGGGG |
| | ACAAGACATCCCTGTTTAATATTTAAACAGCAGTGTTCCCAAACT |
| | GGGTTCTTATATCCCTTGCTCTGGTCAACCAGGTTGCAGGGTTTC |
| | CTGTCCTCACAGGAACGAAGTCCCTAAAGAAACAGTGGCAGCCAG |
| | GTTTAGCCCCGGAATTGACTGGATTCCTTTTTTAGGGCCCATTGG |
| | TATGGCTTTTTCCCCGTATCCCCCCAGGTGTCTGCAGGCTCAAAG |
| | AGCAGCGAGAAGCGTTCAGAGGAAAGCGATCCCGTGCCACCTTCC |
| | CCGTGCCCGGGCTGTCCCCGCACGCTGCCGGCTCGGGGATGCGGG |
| | GGGAGCGCCGGACCGGAGCGGAGCCCCGGGCGGCTCGCTGCTGCC |
| | CCCTAGCGGGGGAGGGACGTAATTACATCCCTGGGGGCTTTGGGG |
| | GGGGGCTGTCCCTGATATCTATAACAAGAAAATATATATATAATA |
| | AGTTATCACGTAAGTAGAACATGAAATAACAATATAATTATCGTA |
| | TGAGTTAAATCTTAAAAGTCACGTAAAAGATAATCATGCGTCATT |
| | TTGACTCACGCGGTCGTTATAGTTCAAAATCAGTGACACTTACCG |
| | CATTGACAAGCACGCCTCACGGGAGCTCCAAGCGGCGACTGAGAT |
| | GTCCTAAATGCACAGCGACGGATTCGCGCTATTTAGAAAGAGAGA |
| | GCAATATTTCAAGAATGCATGCGTCAATTTTACGCAGACTATCTT |
| | TCTAGGGTTAATCTAGCTGCATCAGGATCATATCGTCGGGTCTTT |
| | TTTCCGGCTCAGTCATCGCCCAAGCTGGCGCTATCTGGGCATCGG |
| | GGAGGAAGAAGCCCGTGCCTTTTCCCGCGAGGTTGAAGCGGCATG |
| | GAAAGAGTTTGCCGAGGATGACTGCTGCTGCATTGACGTTGAGCG |
| | AAAACGCACGTTTACCATGATGATTCGGGAAGGTGTGGCCATGCA |
| | CGCCTTTAACGGTGAACTGTTCGTTCAGGCCACCTGGGATACCAG |
| | TTCGTCGCGGCTTTTCCGGACACAGTTCCGGATGGTCAGCCCGAA |
| | GCGCATCAGCAACCCGAACAATACCGGCGACAGCCGGAACTGCCG |
| | TGCCGGTGTGCAGATTAATGACAGCGGTGCGGCGCTGGGATATTA |
| | CGTCAGCGAGGACGGGTATCCTGGCTGGATGCCGCAGAAATGGAC |
| | ATGGATACCCCGTGAGTTACCCGGCGGGCGCGCTTGGCGTAATCA |
| | TGGTCATAGCTGTTTCCTGTGTGAAATTGTTATCCGCTCACAATT |
| | CCACACAACATACGAGCCGGAAGCATAAAGTGTAAAGCCTGGGGT |
| | GCCTAATGAGTGAGCTAACTCACATTAATTGCGTTGCGCTCACTG |
| | CCCGCTTTCCAGTCGGGAAACCTGTCGTGCCAGCTGCATTAATGA |
| | ATCGGCCAACGCGCGGGGAGAGGCGGTTTGCGTATTGGGCGCTCT |
| | TCCGCTTCCTCGCTCACTGACTCGCTGCGCTCGGTCGTTCGGCTG |
| | CGGCGAGCGGTATCAGCTCACTCAAAGGCGGTAATACGGTTATCC |
| | ACAGAATCAGGGGATAACGCAGGAAAGAACATGTGAGCAAAAGGC |
| | CAGCAAAAGGCCAGGAACCGTAAAAAGGCCGCGTTGCTGGCGTTT |
| | TTCCATAGGCTCCGCCCCCCTGACGAGCATCACAAAAATCGACGC |
| | TCAAGTCAGAGGTGGCGAAACCCGACAGGACTATAAAGATACCAG |
| | GCGTTTCCCCCTGGAAGCTCCCTCGTGCGCTCTCCTGTTCCGACC |
| | CTGCCGCTTACCGGATACCTGTCCGCCTTTCTCCCTTCGGGAAGC |
| | GTGGCGCTTTCTCATAGCTCACGCTGTAGGTATCTCAGTTCGGTG |
| | TAGGTCGTTCGCTCCAAGCTGGGCTGTGTGCACGAACCCCCCGTT |
| | CAGCCCGACCGCTGCGCCTTATCCGGTAACTATCGTCTTGAGTCC |
| | AACCCGGTAAGACACGACTTATCGCCACTGGCAGCAGCCACTGGT |
| | AACAGGATTAGCAGAGCGAGGTATGTAGGCGGTGCTACAGAGTTC |
| | TTGAAGTGGTGGCCTAACTACGGCTACACTAGAAGGACAGTATTT |
| | GGTATCTGCGCTCTGCTGAAGCCAGTTACCTTCGGAAAAAGAGTT |
| | GGTAGCTCTTGATCCGGCAAACAAACCACCGCTGGTAGCGGTGGT |
| | TTTTTTGTTTGCAAGCAGCAGATTACGCGCAGAAAAAAAGGATCT |
| | CAAGAAGATCCTTTGATCTTTTCTACGGGGTCTGACGCTCAGTGG |
| | AACGAAAACTCACGTTAAGGGATTTTGGTCATGAGATTATCAAAA |
| | AGGATCTTCACCTAGATCCTTTTAAATTAAAAATGAAGTTTTAAA |
| | TCAATCTAAAGTATATATGAGTAAACTTGGTCTGACAGTTACCAA |
| | TGCTTAATCAGTGAGGCACCTATCTCAGCGATCTGTCTATTTCGT |
| | TCATCCATAGTTGCCTGACTCCCCGTCGTGTAGATAACTACGATA |
| | CGGGAGGGCTTACCATCTGGCCCCAGTGCTGCAATGATACCGCGA |
| | GACCCACGCTCACCGGCTCCAGATTTATCAGCAATAAACCAGCCA |
| | GCCGGAAGGGCCGAGCGCAGAAGTGGTCCTGCAACTTTATCCGCC |
| | TCCATCCAGTCTATTAATTGTTGCCGGGAAGCTAGAGTAAGTAGT |
| | TCGCCAGTTAATAGTTTGCGCAACGTTGTTGCCATTGCTACAGGC |
| | ATCGTGGTGTCACGCTCGTCGTTTGGTATGGCTTCATTCAGCTCC |
| | GGTTCCCAACGATCAAGGCGAGTTACATGATCCCCCATGTTGTGC |
| | AAAAAAGCGGTTAGCTCCTTCGGTCCTCCGATCGTTGTCAGAAGT |
| | AAGTTGGCCGCAGTGTTATCACTCATGGTTATGGCAGCACTGCAT |
| | AATTCTCTTACTGTCATGCCATCCGTAAGATGCTTTTCTGTGACT |
| | GGTGAGTACTCAACCAAGTCATTCTGAGAATAGTGTATGCGGCGA |
| | CCGAGTTGCTCTTGCCCGGCGTCAATACGGGATAATACCGCGCCA |
| | CATAGCAGAACTTTAAAAGTGCTCATCATTGGAAAACGTTCTTCG |
| | GGGCGAAAACTCTCAAGGATCTTACCGCTGTTGAGATCCAGTTCG |
| | ATGTAACCCACTCGTGCACCCAACTGATCTTCAGCATCTTTTACT |
| | TTCACCAGCGTTTCTGGGTGAGCAAAAACAGGAAGGCAAAATGCC |
| | GCAAAAAAGGGAATAAGGGCGACACGGAAATGTTGAATACTCAT |
| | (SEQ ID NO: 82) |
| PB-TRE-H2B- | ACTCTTCCTTTTTCAATATTATTGAAGCATTTATCAGGGTTATTG |
| Citrine- | TCTCATGAGCGGATACATATTTGAATGTATTTAGAAAAATAAACA |
| (Mod.SDHA_Lambda2)- | AATAGGGGTTCCGCGCACATTTCCCCGAAAAGTGCCACCTAAATT |
| EF1a-Puro- | GTAAGCGTTAATATTTTGTTAAAATTCGCGTTAAATTTTTGTTAA |
| rtTA-Cherry + U6- | ATCAGCTCATTTTTTAACCAATAGGCCGAAATCGGCAAAATCCCT |
| crRNA | TATAAATCAAAAGAATAGACCGAGATAGGGTTGAGTGTTGTTCCA |
| | GTTTGGAACAAGAGTCCACTATTAAAGAACGTGGACTCCAACGTC |
| | AAAGGGCGAAAAACCGTCTATCAGGGCGATGGCCCACTACGTGAA |
| | CCATCACCCTAATCAAGTTTTTTGGGGTCGAGGTGCCGTAAAGCA |
| | CTAAATCGGAACCCTAAAGGGAGCCCCCGATTTAGAGCTTGACGG |
| | GGAAAGCCGGCGAACGTGGCGAGAAAGGAAGGGAAGAAAGCGAAA |
| | GGAGCGGGCGCTAGGGCGCTGGCAAGTGTAGCGGTCACGCTGCGC |
| | GTAACCACCACACCCGCCGCGCTTAATGCGCCGCTACAGGGCGCG |
| | TCCCATTCGCCATTCAGGCTGCGCAACTGTTGGGAAGGGCGATCG |
| | GTGCGGGCCTCTTCGCTATTACGCCAGCTGGCGAAAGGGGGATGT |
| | GCTGCAAGGCGATTAAGTTGGGTAACGCCAGGGTTTTCCCAGTCA |
| | CGACGTTGTAAAACGACGGCCAGTGAGCGCGCCTCGTTCATTCAC |
| | GTTTTTGAACCCGTGGAGGACGGGCAGACTCGCGGTGCAAATGTG |
| | TTTTACAGCGTGATGGAGCAGATGAAGATGCTCGACACGCTGCAG |
| | AACACGCAGCTAGATTAACCCTAGAAAGATAATCATATTGTGACG |
| | TACGTTAAAGATAATCATGTGTAAAATTGACGCATGTGTTTTATC |
| | GGTCTGTATATCGAGGTTTATTTATTTAATTTGAATAGATATTAG |
| | TTTTATTATATTTACACTTACATACTAATAATAAATTCAACAAAC |
| | AATTTATTTATGTTTATTTATTTATTAAAAAAAACAAAAACTCAA |
| | AATTTCTTCTATAAAGTAACAAAACTTTTATGAGGGACAGCCCCC |
| | CCCCAAAGCCCCCAGGGATGTAATTACGTCCCTCCCCCGCTAGGG |
| | GGCAGCAGCGAGCCGCCCGGGGCTCCGCTCCGGTCCGGCGCTCCC |
| | CCCGCATCCCCGAGCCGGCAGCGTGCGGGGACAGCCCGGGCACGG |
| | GGAAGGTGGCACGGGATCGCTTTCCTCTGAACGCTTCTCGCTGCT |
| | CTTTGAGCCTGCAGACACCTGGGGGGATACGGGGAAAAGGCCTCC |
| | ACGGCCAAAAAAATCGACCTGTTCTCGAACATGGCATTGGGAACA |
| | CGTTTTAGTCCCCTTCGTTTTTGGGGTAGTCTAAATCGGTGTTTC |
| | GTCCTTTCCACAAGATATATAAAGCCAAGAAATCGAAATACTTTC |
| | AAGTTACGGTAAGCATATGATAGTCCATTTTAAAACATAATTTTA |
| | AAACTGCAAACTACCCAAGAAATTATTACTTTCTACGTCACGTAT |
| | TTTGTACTAATATCTTTGTGTTTACAGTCAAATTAATTCTAATTA |
| | TCTCTCTAACAGCCTTGTATCGTATATGCAAATATGAAGGAATCA |
| | TGGGAAATAGGCCCTCTTCCTGCCCGACCTGACTAGTACTTTCAC |
| | TTTTCTCTATCACTGATAGGGAGTGGTAAACTCGACTTTCACTTT |
| | TCTCTATCACTGATAGGGAGTGGTAAACTCGACTTTCACTTTTCT |
| | CTATCACTGATAGGGAGTGGTAAACTCGACTTTCACTTTTCTCTA |
| | TCACTGATAGGGAGTGGTAAACTCGACTTTCACTTTTCTCTATCA |
| | CTGATAGGGAGTGGTAAACTCGACTTTCACTTTTCTCTATCACTG |
| | ATAGGGAGTGGTAAACTCGACTTTCACTTTTCTCTATCACTGATA |
| | GGGAGTGGTAAACTCGACCTATATAAGCAGAGCTCGTTTAGTGAA |
| | CCGTCAGATCGCCTGGAGACGCCATCCACGCTGTTTTGACCTCCA |
| | TAGAAGACACCGGGACCGATCCAGCCTCCGCGGCCCCGAATTCAT |
| | GCCAGAGCCAGCGAAGTCTGCTCCCGCCCCGAAAAAGGGCTCCAA |
| | GAAGGCGGTGACTAAGGCGCAGAAGAAAGGCGGCAAGAAGCGCAA |
| | GCGCAGCCGCAAGGAGAGCTATTCCATCTATGTGTACAAGGTTCT |
| | GAAGCAGGTCCACCCTGACACCGGCATTTCGTCCAAGGCCATGGG |
| | CATCATGAATTCGTTTGTGAACGACATTTTCGAGCGCATCGCAGG |
| | TGAGGCTTCCCGCCTGGCGCATTACAACAAGCGCTCGACCATCAC |
| | CTCCAGGGAGATCCAGACGGCCGTGCGCCTGCTGCTGCCTGGGGA |
| | GTTGGCCAAGCACGCCGTGTCCGAGGGTACTAAGGCCATCACCAA |
| | GTACACCAGCGCTAAGGATCCCCGGGTACCGGTCGCCACCATGGT |
| | GAGCAAGGGCGAGGAGCTGTTCACCGGGGTGGTGCCCATCCTGGT |
| | CGAGCTGGACGGCGACGTAAACGGCCACAAGTTCAGCGTGTCCGG |
| | CGAGGGCGAGGGCGATGCCACCTACGGCAAGCTGACCCTGAAGTT |
| | CATCTGCACCACCGGCAAGCTGCCCGTGCCCTGGCCCACCCTCGT |
| | GACCACCTTCGGCTACGGCCTGATGTGCTTCGCCCGCTACCCCGA |
| | CCACATGAAGCAGCACGACTTCTTCAAGTCCGCCATGCCCGAAGG |
| | CTACGTCCAGGAGCGCACCATCTTCTTCAAGGACGACGGCAACTA |
| | CAAGACCCGCGCCGAGGTGAAGTTCGAGGGCGACACCCTGGTGAA |
| | CCGCATCGAGCTGAAGGGCATCGACTTCAAGGAGGACGGCAACAT |
| | CCTGGGGCACAAGCTGGAGTACAACTACAACAGCCACAACGTCTA |
| | TATCATGGCCGACAAGCAGAAGAACGGCATCAAGGTGAACTTCAA |
| | GATCCGCCACAACATCGAGGACGGCAGCGTGCAGCTCGCCGACCA |
| | CTACCAGCAGAACACCCCCATCGGCGACGGCCCCGTGCTGCTGCC |
| | CGACAACCACTACCTGAGCTACCAGTCCGCCCTGAGCAAAGACCC |
| | CAACGAGAAGCGCGATCACATGGTCCTGCTGGAGTTCGTGACCGC |
| | CGCCGGGATCACTCTCGGCATGGACGAGCTGTACAAGTAATCTAG |
| | AGCTAGCGCATATGTCCACTTAAGGGCGCTGACATGCGCATGTGA |
| | GGATCAATTCTTACGCTGAGTACTTCGATTCCTCAAATAGCAAGA |
| | CAGCCCACATGGCATTCCACTTATCACTGGCATCCTAGATCTGAT |
| | AGCTTTGTTCTCAAAGTCTCGAGAAATTCGAATTTAAATCGGCCT |
| | CGACTGTGCCTTCTAGTTGCCAGCCATCTGTTGTTTGCCCCTCCC |
| | CCGTGCCTTCCTTGACCCTGGAAGGTGCCACTCCCACTGTCCTTT |
| | CCTAATAAAATGAGGAAATTGCATCGCATTGTCTGAGTAGGTGTC |
| | ATTCTATTCTGGGGGGTGGGGTGGGGCAGGACAGCAAGGGGGAGG |
| | ATTGGGAAGACAATAGCAGGCATGCTGGGGACGCGGCCGCGAAGG |
| | ATCTGCGATCGCTCCGGTGCCCGTCAGTGGGCAGAGCGCACATCG |
| | CCCACAGTCCCCGAGAAGTTGGGGGGAGGGGTCGGCAATTGAACG |
| | GGTGCCTAGAGAAGGTGGCGCGGGGTAAACTGGGAAAGTGATGTC |
| | GTGTACTGGCTCCGCCTTTTTCCCGAGGGTGGGGGAGAACCGTAT |
| | ATAAGTGCAGTAGTCGCCGTGAACGTTCTTTTTCGCAACGGGTTT |
| | GCCGCCAGAACACAGCTGAAGCTTCGAGGGGCTCGCATCTCTCCT |
| | TCACGCGCCCGCCGCCCTACCTGAGGCCGCCATCCACGCCGGTTG |
| | AGTCGCGTTCTGCCGCCTCCCGCCTGTGGTGCCTCCTGAACTGCG |
| | TCCGCCGTCTAGGTAAGTTTAAAGCTCAGGTCGAGACCGGGCCTT |
| | TGTCCGGCGCTCCCTTGGAGCCTACCTAGACTCAGCCGGCTCTCC |
| | ACGCTTTGCCTGACCCTGCTTGCTCAACTCTACGTCTTTGTTTCG |
| | TTTTCTGTTCTGCGCCGTTACAGATCCAAGCTGTGACCGGCGCCT |
| | ACGCTAGATGACCGAGTACAAGCCCACGGTGCGCCTCGCCACCCG |
| | CGACGACGTCCCCAGGGCCGTACGCACCCTCGCCGCCGCGTTCGC |
| | CGACTACCCCGCCACGCGCCACACCGTCGATCCGGACCGCCACAT |
| | CGAGCGGGTCACCGAGCTGCAAGAACTCTTCCTCACGCGCGTCGG |
| | GCTCGACATCGGCAAGGTGTGGGTCGCGGACGACGGCGCCGCGGT |
| | GGCGGTCTGGACCACGCCGGAGAGCGTCGAAGCGGGGGCGGTGTT |
| | CGCCGAGATCGGCCCGCGCATGGCCGAGTTGAGCGGTTCCCGGCT |
| | GGCCGCGCAGCAACAGATGGAAGGCCTCCTGGCGCCGCACCGGCC |
| | CAAGGAGCCCGCGTGGTTCCTGGCCACCGTCGGCGTCTCGCCCGA |
| | CCACCAGGGCAAGGGTCTGGGCAGCGCCGTCGTGCTCCCCGGAGT |
| | GGAGGCGGCCGAGCGCGCCGGGGTGCCCGCCTTCCTGGAGACCTC |
| | CGCGCCCCGCAACCTCCCCTTCTACGAGCGGCTCGGCTTCACCGT |
| | CACCGCCGACGTCGAGGTGCCCGAAGGACCGCGCACCTGGTGCAT |
| | GACCCGCAAGCCCGGTGCCGGAAGCGGAGCTACTAACTTCAGCCT |
| | GCTGAAGCAGGCTGGAGACGTGGAGGAGAACCCTGGACCTATGTC |
| | TAGACTGGACAAGAGCAAAGTCATAAACGGCGCTCTGGAATTACT |
| | CAATGGAGTCGGTATCGAAGGCCTGACGACAAGGAAACTCGCTCA |
| | AAAGCTGGGAGTTGAGCAGCCTACCCTGTACTGGCACGTGAAGAA |
| | CAAGCGGGCCCTGCTCGATGCCCTGCCAATCGAGATGCTGGACAG |
| | GCATCATACCCACTTCTGCCCCCTGGAAGGCGAGTCATGGCAAGA |
| | CTTTCTGCGGAACAACGCCAAGTCATTCCGCTGTGCTCTCCTCTC |
| | ACATCGCGACGGGGCTAAAGTGCATCTCGGCACCCGCCCAACAGA |
| | GAAACAGTACGAAACCCTGGAAAATCAGCTCGCGTTCCTGTGTCA |
| | GCAAGGCTTCTCCCTGGAGAACGCACTGTACGCTCTGTCCGCCGT |
| | GGGCCACTTTACACTGGGCTGCGTATTGGAGGAACAGGAGCATCA |
| | AGTAGCAAAAGAGGAAAGAGAGACACCTACCACCGATTCTATGCC |
| | CCCACTTCTGAGACAAGCAATTGAGCTGTTCGACCGGCAGGGAGC |
| | CGAACCTGCCTTCCTTTTCGGCCTGGAACTAATCATATGTGGCCT |
| | GGAGAAACAGCTAAAGTGCGAAAGCGGCGGGCCGGCCGACGCCCT |
| | TGACGATTTTGACTTAGACATGCTCCCAGCCGATGCCCTTGACGA |
| | CTTTGACCTTGATATGCTGCCTGCTGACGCTCTTGACGATTTTGA |
| | CCTTGACATGCTCCCCGGGTAACTAAGTAACCCTCTCCCTCCCCC |
| | CCCCCTAACGTTACTGGCCGAAGCCGCTTGGAATAAGGCCGGTGT |
| | GCGTTTGTCTATATGTTATTTTCCACCATATTGCCGTCTTTTGGC |
| | AATGTGAGGGCCCGGAAACCTGGCCCTGTCTTCTTGACGAGCATT |
| | CCTAGGGGTCTTTCCCCTCTCGCCAAAGGAATGCAAGGTCTGTTG |
| | AATGTCGTGAAGGAAGCAGTTCCTCTGGAAGCTTCTTGAAGACAA |
| | ACAACGTCTGTAGCGACCCTTTGCAGGCAGCGGAACCCCCCACCT |
| | GGCGACAGGTGCCTCTGCGGCCAAAAGCCACGTGTATAAGATACA |
| | CCTGCAAAGGCGGCACAACCCCAGTGCCACGTTGTGAGTTGGATA |
| | GTTGTGGAAAGAGTCAAATGGCTCTCCTCAAGCGTATTCAACAAG |
| | GGGCTGAAGGATGCCCAGAAGGTACCCCATTGTATGGGATCTGAT |
| | CTGGGGCCTCGGTGCACATGCTTTACATGTGTTTAGTCGAGGTTA |
| | AAAAAACGTCTAGGCCCCCCGAACCACGGGGACGTGGTTTTCCTT |
| | TGAAAAACACGATGATAATATGGCCACAACCATGGTCTCTAAAGG |
| | AGGTTCGTCCGACGACGAAGCAACAGCGGACTCGCAGCACGCCGC |
| | ACCTCCTAAGAAGAAAAGGAAGGTAGGGGATCCCCGGGTACCGGT |
| | CGCCACCATGGCCATCATCAAGGAGTTCATGCGCTTCAAGGTGCA |
| | CATGGAGGGCTCCGTGAACGGCCACGAGTTCGAGATCGAGGGCGA |
| | GGGCGAGGGCCGCCCCTACGAGGGCACCCAGACCGCCAAGCTGAA |
| | GGTGACCAAGGGTGGCCCCCTGCCCTTCGCCTGGGACATCCTGTC |
| | CCCTCAGTTCATGTACGGCTCCAAGGCCTACGTGAAGCACCCCGC |
| | CGACATCCCCGACTACTTGAAGCTGTCCTTCCCCGAGGGCTTCAA |
| | GTGGGAGCGCGTGATGAACTTCGAGGACGGCGGCGTGGTGACCGT |
| | GACCCAGGACTCCTCCCTGCAGGACGGCGAGTTCATCTACAAGGT |
| | GAAGCTGCGCGGCACCAACTTCCCCTCCGACGGCCCCGTAATGCA |
| | GAAGAAGACCATGGGCTGGGAGGCCTCCTCCGAGCGGATGTACCC |
| | CGAGGACGGCGCCCTGAAGGGCGAGATCAAGCAGAGGCTGAAGCT |
| | GAAGGACGGCGGCCACTACGACGCTGAGGTCAAGACCACCTACAA |
| | GGCCAAGAAGCCCGTGCAGCTGCCCGGCGCCTACAACGTCAACAT |
| | CAAGTTGGACATCACCTCCCACAACGAGGACTACACCATCGTGGA |
| | ACAGTACGAACGCGCCGAGGGCCGCCACTCCACCGGCGGCATGGA |
| | CGAGCTGTACAAGTAAAATCAACCTCTGGATTACAAAATTTGTGA |
| | AAGATTGACTGGTATTCTTAACTATGTTGCTCCTTTTACGCTATG |
| | TGGATACGCTGCTTTAATGCCTTTGTATCATGCGTTAACTAAACT |
| | TGTTTATTGCAGCTTATAATGGTTACAAATAAAGCAATAGCATCA |
| | CAAATTTCACAAATAAAGCATTTTTTTCACTGCATTCTAGTTGTG |
| | GTTTGTCCAAACTCATCAATGTATCTTATCATGTCTGGAATTGAC |
| | TCAAATGATGTCAATTAGTCTATCAGAAGCTCATCTGGTCTCCCT |
| | TCCGGGGGACAAGACATCCCTGTTTAATATTTAAACAGCAGTGTT |
| | CCCAAACTGGGTTCTTATATCCCTTGCTCTGGTCAACCAGGTTGC |
| | AGGGTTTCCTGTCCTCACAGGAACGAAGTCCCTAAAGAAACAGTG |
| | GCAGCCAGGTTTAGCCCCGGAATTGACTGGATTCCTTTTTTAGGG |
| | CCCATTGGTATGGCTTTTTCCCCGTATCCCCCCAGGTGTCTGCAG |
| | GCTCAAAGAGCAGCGAGAAGCGTTCAGAGGAAAGCGATCCCGTGC |
| | CACCTTCCCCGTGCCCGGGCTGTCCCCGCACGCTGCCGGCTCGGG |
| | GATGCGGGGGGAGCGCCGGACCGGAGCGGAGCCCCGGGCGGCTCG |
| | CTGCTGCCCCCTAGCGGGGGAGGGACGTAATTACATCCCTGGGGG |
| | CTTTGGGGGGGGGCTGTCCCTGATATCTATAACAAGAAAATATAT |
| | ATATAATAAGTTATCACGTAAGTAGAACATGAAATAACAATATAA |
| | TTATCGTATGAGTTAAATCTTAAAAGTCACGTAAAAGATAATCAT |
| | GCGTCATTTTGACTCACGCGGTCGTTATAGTTCAAAATCAGTGAC |
| | ACTTACCGCATTGACAAGCACGCCTCACGGGAGCTCCAAGCGGCG |
| | ACTGAGATGTCCTAAATGCACAGCGACGGATTCGCGCTATTTAGA |
| | AAGAGAGAGCAATATTTCAAGAATGCATGCGTCAATTTTACGCAG |
| | ACTATCTTTCTAGGGTTAATCTAGCTGCATCAGGATCATATCGTC |
| | GGGTCTTTTTTCCGGCTCAGTCATCGCCCAAGCTGGCGCTATCTG |
| | GGCATCGGGGAGGAAGAAGCCCGTGCCTTTTCCCGCGAGGTTGAA |
| | GCGGCATGGAAAGAGTTTGCCGAGGATGACTGCTGCTGCATTGAC |
| | GTTGAGCGAAAACGCACGTTTACCATGATGATTCGGGAAGGTGTG |
| | GCCATGCACGCCTTTAACGGTGAACTGTTCGTTCAGGCCACCTGG |
| | GATACCAGTTCGTCGCGGCTTTTCCGGACACAGTTCCGGATGGTC |
| | AGCCCGAAGCGCATCAGCAACCCGAACAATACCGGCGACAGCCGG |
| | AACTGCCGTGCCGGTGTGCAGATTAATGACAGCGGTGCGGCGCTG |
| | GGATATTACGTCAGCGAGGACGGGTATCCTGGCTGGATGCCGCAG |
| | AAATGGACATGGATACCCCGTGAGTTACCCGGCGGGCGCGCTTGG |
| | CGTAATCATGGTCATAGCTGTTTCCTGTGTGAAATTGTTATCCGC |
| | TCACAATTCCACACAACATACGAGCCGGAAGCATAAAGTGTAAAG |
| | CCTGGGGTGCCTAATGAGTGAGCTAACTCACATTAATTGCGTTGC |
| | GCTCACTGCCCGCTTTCCAGTCGGGAAACCTGTCGTGCCAGCTGC |
| | ATTAATGAATCGGCCAACGCGCGGGGAGAGGCGGTTTGCGTATTG |
| | GGCGCTCTTCCGCTTCCTCGCTCACTGACTCGCTGCGCTCGGTCG |
| | TTCGGCTGCGGCGAGCGGTATCAGCTCACTCAAAGGCGGTAATAC |
| | GGTTATCCACAGAATCAGGGGATAACGCAGGAAAGAACATGTGAG |
| | CAAAAGGCCAGCAAAAGGCCAGGAACCGTAAAAAGGCCGCGTTGC |
| | TGGCGTTTTTCCATAGGCTCCGCCCCCCTGACGAGCATCACAAAA |
| | ATCGACGCTCAAGTCAGAGGTGGCGAAACCCGACAGGACTATAAA |
| | GATACCAGGCGTTTCCCCCTGGAAGCTCCCTCGTGCGCTCTCCTG |
| | TTCCGACCCTGCCGCTTACCGGATACCTGTCCGCCTTTCTCCCTT |
| | CGGGAAGCGTGGCGCTTTCTCATAGCTCACGCTGTAGGTATCTCA |
| | GTTCGGTGTAGGTCGTTCGCTCCAAGCTGGGCTGTGTGCACGAAC |
| | CCCCCGTTCAGCCCGACCGCTGCGCCTTATCCGGTAACTATCGTC |
| | TTGAGTCCAACCCGGTAAGACACGACTTATCGCCACTGGCAGCAG |
| | CCACTGGTAACAGGATTAGCAGAGCGAGGTATGTAGGCGGTGCTA |
| | CAGAGTTCTTGAAGTGGTGGCCTAACTACGGCTACACTAGAAGGA |
| | CAGTATTTGGTATCTGCGCTCTGCTGAAGCCAGTTACCTTCGGAA |
| | AAAGAGTTGGTAGCTCTTGATCCGGCAAACAAACCACCGCTGGTA |
| | GCGGTGGTTTTTTTGTTTGCAAGCAGCAGATTACGCGCAGAAAAA |
| | AAGGATCTCAAGAAGATCCTTTGATCTTTTCTACGGGGTCTGACG |
| | CTCAGTGGAACGAAAACTCACGTTAAGGGATTTTGGTCATGAGAT |
| | TATCAAAAAGGATCTTCACCTAGATCCTTTTAAATTAAAAATGAA |
| | GTTTTAAATCAATCTAAAGTATATATGAGTAAACTTGGTCTGACA |
| | GTTACCAATGCTTAATCAGTGAGGCACCTATCTCAGCGATCTGTC |
| | TATTTCGTTCATCCATAGTTGCCTGACTCCCCGTCGTGTAGATAA |
| | CTACGATACGGGAGGGCTTACCATCTGGCCCCAGTGCTGCAATGA |
| | TACCGCGAGACCCACGCTCACCGGCTCCAGATTTATCAGCAATAA |
| | ACCAGCCAGCCGGAAGGGCCGAGCGCAGAAGTGGTCCTGCAACTT |
| | TATCCGCCTCCATCCAGTCTATTAATTGTTGCCGGGAAGCTAGAG |
| | TAAGTAGTTCGCCAGTTAATAGTTTGCGCAACGTTGTTGCCATTG |
| | CTACAGGCATCGTGGTGTCACGCTCGTCGTTTGGTATGGCTTCAT |
| | TCAGCTCCGGTTCCCAACGATCAAGGCGAGTTACATGATCCCCCA |
| | TGTTGTGCAAAAAAGCGGTTAGCTCCTTCGGTCCTCCGATCGTTG |
| | TCAGAAGTAAGTTGGCCGCAGTGTTATCACTCATGGTTATGGCAG |
| | CACTGCATAATTCTCTTACTGTCATGCCATCCGTAAGATGCTTTT |
| | CTGTGACTGGTGAGTACTCAACCAAGTCATTCTGAGAATAGTGTA |
| | TGCGGCGACCGAGTTGCTCTTGCCCGGCGTCAATACGGGATAATA |
| | CCGCGCCACATAGCAGAACTTTAAAAGTGCTCATCATTGGAAAAC |
| | GTTCTTCGGGGCGAAAACTCTCAAGGATCTTACCGCTGTTGAGAT |
| | CCAGTTCGATGTAACCCACTCGTGCACCCAACTGATCTTCAGCAT |
| | CTTTTACTTTCACCAGCGTTTCTGGGTGAGCAAAAACAGGAAGGC |
| | AAAATGCCGCAAAAAAGGGAATAAGGGCGACACGGAAATGTTGAA |
| | TACTCAT (SEQ ID NO: 83) |
| PB-TRE-V5- | ACTCTTCCTTTTTCAATATTATTGAAGCATTTATCAGGGTTATTG |
| dCas13b-NES EF | TCTCATGAGCGGATACATATTTGAATGTATTTAGAAAAATAAACA |
| NLS-Turq | AATAGGGGTTCCGCGCACATTTCCCCGAAAAGTGCCACCTAAATT |
| | GTAAGCGTTAATATTTTGTTAAAATTCGCGTTAAATTTTTGTTAA |
| | ATCAGCTCATTTTTTAACCAATAGGCCGAAATCGGCAAAATCCCT |
| | TATAAATCAAAAGAATAGACCGAGATAGGGTTGAGTGTTGTTCCA |
| | GTTTGGAACAAGAGTCCACTATTAAAGAACGTGGACTCCAACGTC |
| | AAAGGGCGAAAAACCGTCTATCAGGGCGATGGCCCACTACGTGAA |
| | CCATCACCCTAATCAAGTTTTTTGGGGTCGAGGTGCCGTAAAGCA |
| | CTAAATCGGAACCCTAAAGGGAGCCCCCGATTTAGAGCTTGACGG |
| | GGAAAGCCGGCGAACGTGGCGAGAAAGGAAGGGAAGAAAGCGAAA |
| | GGAGCGGGCGCTAGGGCGCTGGCAAGTGTAGCGGTCACGCTGCGC |
| | GTAACCACCACACCCGCCGCGCTTAATGCGCCGCTACAGGGCGCG |
| | TCCCATTCGCCATTCAGGCTGCGCAACTGTTGGGAAGGGCGATCG |
| | GTGCGGGCCTCTTCGCTATTACGCCAGCTGGCGAAAGGGGGATGT |
| | GCTGCAAGGCGATTAAGTTGGGTAACGCCAGGGTTTTCCCAGTCA |
| | CGACGTTGTAAAACGACGGCCAGTGAGCGCGCCTCGTTCATTCAC |
| | GTTTTTGAACCCGTGGAGGACGGGCAGACTCGCGGTGCAAATGTG |
| | TTTTACAGCGTGATGGAGCAGATGAAGATGCTCGACACGCTGCAG |
| | AACACGCAGCTAGATTAACCCTAGAAAGATAATCATATTGTGACG |
| | TACGTTAAAGATAATCATGTGTAAAATTGACGCATGTGTTTTATC |
| | GGTCTGTATATCGAGGTTTATTTATTAATTTGAATAGATATTAAG |
| | TTTTATTATATTTACACTTACATACTAATAATAAATTCAACAAAC |
| | AATTTATTTATGTTTATTTATTTATTAAAAAAAACAAAAACTCAA |
| | AATTTCTTCTATAAAGTAACAAAACTTTTATGAGGGACAGCCCCC |
| | CCCCAAAGCCCCCAGGGATGTAATTACGTCCCTCCCCCGCTAGGG |
| | GGCAGCAGCGAGCCGCCCGGGGCTCCGCTCCGGTCCGGCGCTCCC |
| | CCCGCATCCCCGAGCCGGCAGCGTGCGGGGACAGCCCGGGCACGG |
| | GGAAGGTGGCACGGGATCGCTTTCCTCTGAACGCTTCTCGCTGCT |
| | CTTTGAGCCTGCAGACACCTGGGGGGATACGGGGAAAAGGCCTCC |
| | ACGGCCACTAGTTCTACCGGGTAGGGGAGGCGCTTTTCCCAAGGC |
| | AGTCTGGAGCATGCGCTTTAGCAGCCCCGCTGGGCACTTGGCGCT |
| | ACACAAGTGGCCTCTGGCCTCGCACACATTCCACATCCACCGGTA |
| | GGCGCCAACCGGCTCCGTTCTTTGGTGGCCCCTTCGCGCCACCTT |
| | CTACTCCTCCCCTAGTCAGGAAGTTCCCCCCCGCCCCGCAGCTCG |
| | CGTCGTGCAGGACGTGACAAATGGAAGTAGCACGTCTCATTAGTC |
| | TCGTGCAGATGGACAGCACCGCTGAGCAATGGAAGCGGGTAGGCC |
| | TTTGGGGCAGCGGCCAATAGCAGCTTTGCTCCTTCGCTTTCTGGG |
| | CTCAGAGGCTGGGAAGGGGTGGGTCCGGGGGCGGGCTCAGGGGCG |
| | GGCTCAGGGGCGGGGCGGGCGCCCGAAGGTCCTCCGGAGGCCCGG |
| | CATTCTGCACGCTTCAAAAGCGCACGTCTGCCGCGCTGTTCTCCT |
| | CTTCCTCATCTCCGGGCCTTTCGACCTGCAGGTTAATTAAATGGG |
| | TAAGCCTATCCCTAACCCTCTCCTCGGTCTCGATTCTACGGCTAG |
| | CATGAACATCCCCGCTCTGGTGGAAAACCAGAAGAAGTACTTTGG |
| | CACCTACAGCGTGATGGCCATGCTGAACGCTCAGACCGTGCTGGA |
| | CCACATCCAGAAGGTGGCCGATATTGAGGGCGAGCAGAACGAGAA |
| | CAACGAGAATCTGTGGTTTCACCCCGTGATGAGCCACCTGTACAA |
| | CGCCAAGAACGGCTACGACAAGCAGCCCGAGAAAACCATGTTCAT |
| | CATCGAGCGGCTGCAGAGCTACTTCCCATTCCTGAAGATCATGGC |
| | CGAGAACCAGAGAGAGTACAGCAACGGCAAGTACAAGCAGAACCG |
| | CGTGGAAGTGAACAGCAACGACATCTTCGAGGTGCTGAAGCGCGC |
| | CTTCGGCGTGCTGAAGATGTACAGGGACCTGACCAACGCATACAA |
| | GACCTACGAGGAAAAGCTGAACGACGGCTGCGAGTTCCTGACCAG |
| | CACAGAGCAACCTCTGAGCGGCATGATCAACAACTACTACACAGT |
| | GGCCCTGCGGAACATGAACGAGAGATACGGCTACAAGACAGAGGA |
| | CCTGGCCTTCATCCAGGACAAGCGGTTCAAGTTCGTGAAGGACGC |
| | CTACGGCAAGAAAAAGTCCCAAGTGAATACCGGATTCTTCCTGAG |
| | CCTGCAGGACTACAACGGCGACACACAGAAGAAGCTGCACCTGAG |
| | CGGAGTGGGAATCGCCCTGCTGATCTGCCTGTTCCTGGACAAGCA |
| | GTACATCAACATCTTTCTGAGCAGGCTGCCCATCTTCTCCAGCTA |
| | CAATGCCCAGAGCGAGGAACGGCGGATCATCATCAGATCCTTCGG |
| | CATCAACAGCATCAAGCTGCCCAAGGACCGGATCCACAGCGAGAA |
| | GTCCAACAAGAGCGTGGCCATGGATATGCTCAACGAAGTGAAGCG |
| | GTGCCCCGACGAGCTGTTCACAACACTGTCTGCCGAGAAGCAGTC |
| | CCGGTTCAGAATCATCAGCGACGACCACAATGAAGTGCTGATGAA |
| | GCGGAGCAGCGACAGATTCGTGCCTCTGCTGCTGCAGTATATCGA |
| | TTACGGCAAGCTGTTCGACCACATCAGGTTCCACGTGAACATGGG |
| | CAAGCTGAGATACCTGCTGAAGGCCGACAAGACCTGCATCGACGG |
| | CCAGACCAGAGTCAGAGTGATCGAGCAGCCCCTGAACGGCTTCGG |
| | CAGACTGGAAGAGGCCGAGACAATGCGGAAGCAAGAGAACGGCAC |
| | CTTCGGCAACAGCGGCATCCGGATCAGAGACTTCGAGAACATGAA |
| | GCGGGACGACGCCAATCCTGCCAACTATCCCTACATCGTGGACAC |
| | CTACACACACTACATCCTGGAAAACAACAAGGTCGAGATGTTTAT |
| | CAACGACAAAGAGGACAGCGCCCCACTGCTGCCCGTGATCGAGGA |
| | TGATAGATACGTGGTCAAGACAATCCCCAGCTGCCGGATGAGCAC |
| | CCTGGAAATTCCAGCCATGGCCTTCCACATGTTTCTGTTCGGCAG |
| | CAAGAAAACCGAGAAGCTGATCGTGGACGTGCACAACCGGTACAA |
| | GAGACTGTTCCAGGCCATGCAGAAAGAAGAAGTGACCGCCGAGAA |
| | TATCGCCAGCTTCGGAATCGCCGAGAGCGACCTGCCTCAGAAGAT |
| | CCTGGATCTGATCAGCGGCAATGCCCACGGCAAGGATGTGGACGC |
| | CTTCATCAGACTGACCGTGGACGACATGCTGACCGACACCGAGCG |
| | GAGAATCAAGAGATTCAAGGACGACCGGAAGTCCATTCGGAGCGC |
| | CGACAACAAGATGGGAAAGAGAGGCTTCAAGCAGATCTCCACAGG |
| | CAAGCTGGCCGACTTCCTGGCCAAGGACATCGTGCTGTTTCAGCC |
| | CAGCGTGAACGATGGCGAGAACAAGATCACCGGCCTGAACTACCG |
| | GATCATGCAGAGCGCCATTGCCGTGTACGATAGCGGCGACGATTA |
| | CGAGGCCAAGCAGCAGTTCAAGCTGATGTTCGAGAAGGCCCGGCT |
| | GATCGGCAAGGGCACAACAGAGCCTCATCCATTTCTGTACAAGGT |
| | GTTCGCCCGCAGCATCCCCGCCAATGCCGTCGAGTTCTACGAGCG |
| | CTACCTGATCGAGCGGAAGTTCTACCTGACCGGCCTGTCCAACGA |
| | GATCAAGAAAGGCAACAGAGTGGATGTGCCCTTCATCCGGCGGGA |
| | CCAGAACAAGTGGAAAACACCCGCCATGAAGACCCTGGGCAGAAT |
| | CTACAGCGAGGATCTGCCCGTGGAACTGCCCAGACAGATGTTCGA |
| | CAATGAGATCAAGTCCCACCTGAAGTCCCTGCCACAGATGGAAGG |
| | CATCGACTTCAACAATGCCAACGTGACCTATCTGATCGCCGAGTA |
| | CATGAAGAGAGTGCTGGACGACGACTTCCAGACCTTCTACCAGTG |
| | GAACCGCAACTACCGGTACATGGACATGCTTAAGGGCGAGTACGA |
| | CAGAAAGGGCTCCCTGCAGCACTGCTTCACCAGCGTGGAAGAGAG |
| | AGAAGGCCTCTGGAAAGAGCGGGCCTCCAGAACAGAGCGGTACAG |
| | AAAGCAGGCCAGCAACAAGATCCGCAGCAACCGGCAGATGAGAAA |
| | CGCCAGCAGCGAAGAGATCGAGACAATCCTGGATAAGCGGCTGAG |
| | CAACAGCCGGAACGAGTACCAGAAAAGCGAGAAAGTGATCCGGCG |
| | CTACAGAGTGCAGGATGCCCTGCTGTTTCTGCTGGCCAAAAAGAC |
| | CCTGACCGAACTGGCCGATTTCGACGGCGAGAGGTTCAAACTGAA |
| | AGAAATCATGCCCGACGCCGAGAAGGGAATCCTGAGCGAGATCAT |
| | GCCCATGAGCTTCACCTTCGAGAAAGGCGGCAAGAAGTACACCAT |
| | CACCAGCGAGGGCATGAAGCTGAAGAACTACGGCGACTTCTTTGT |
| | GCTGGCTAGCGACAAGAGGATCGGCAACCTGCTGGAACTCGTGGG |
| | CAGCGACATCGTGTCCAAAGAGGATATCATGGAAGAGTTCAACAA |
| | ATACGACCAGTGCAGGCCCGAGATCAGCTCCATCGTGTTCAACCT |
| | GGAAAAGTGGGCCTTCGACACATACCCCGAGCTGTCTGCCAGAGT |
| | GGACCGGGAAGAGAAGGTGGACTTCAAGAGCATCCTGAAAATCCT |
| | GCTGAACAACAAGAACATCAACAAAGAGCAGAGCGACATCCTGCG |
| | GAAGATCCGGAACGCCTTCGATGCAAACAATTACCCCGACAAAGG |
| | CGTGGTGGAAATCAAGGCCCTGCCTGAGATCGCCATGAGCATCAA |
| | GAAGGCCTTTGGGGAGTACGCCATCATGAAGGGATCCCTTCAACT |
| | GCCTCCACTTGAAAGACTGACACTGCTCGAGAGAGATTAGATCTG |
| | TTGGACGATGATCGGAGAGTGACTGGGTTTAGTATAACCGGTGGT |
| | GAACATAGGCTGAGGAATTATAAATCGGTTACGACGGTTCATAGA |
| | TTTGAGAAAGAAGAAGAAGAAGAAAGGATCTGGACCGTTGTTTTG |
| | GAATCTTATGTTGTTGATGTACCGGAAGGTAATTCGGAGGAAGAT |
| | ACGAGATTGTTTGCTGATACGGTTATTAGATTGAATCTTCAGAAA |
| | CTTGCTTCGATCACTGAAGCTATGAACTCTAGACTTAAGCAACAT |
| | GCTGCTCCGCCGAAAAAGAAGAGAAAAGGTTAAGCCTCGACTGTG |
| | CCTTCTAGTTGCCAGCCATCTGTTGTTTGCCCCTCCCCCGTGCCT |
| | TCCTTGACCCTGGAAGGTGCCACTCCCACTGTCCTTTCCTAATAA |
| | AATGAGGAAATTGCATCGCATTGTCTGAGTAGGTGTCATTCTATT |
| | CTGGGGGGTGGGGTGGGGCAGGACAGCAAGGGGGAGGATTGGGAA |
| | GACAATAGCAGGCATGCTGGGGAGTGCCCGTCAGTGGGCAGAGCG |
| | CACATCGCCCACAGTCCCCGAGAAGTTGGGGGGAGGGGTCGGCAA |
| | TTGAACGGGTGCCTAGAGAAGGTGGCGCGGGGTAAACTGGGAAAG |
| | TGATGTCGTGTACTGGCTCCGCCTTTTTCCCGAGGGTGGGGGAGA |
| | ACCGTATATAAGTGCAGTAGTCGCCGTGAACGTTCTTTTTCGCAA |
| | CGGGTTTGCCGCCAGAACACAGATGGTCTCTAAAGGAGGTTCGTC |
| | CGACGACGAAGCAACAGCGGACTCGCAGCACGCCGCACCTCCTAA |
| | GAAGAAAAGGAAGGTAGGGGATCCCCGGGTACCGGTCGCCACCAT |
| | GGTGAGCAAGGGCGAGGAGCTGTTCACCGGGGTGGTGCCCATCCT |
| | GGTCGAGCTGGACGGCGACGTAAACGGCCACAAGTTCAGCGTGTC |
| | CGGCGAGGGCGAGGGCGATGCCACCTACGGCAAGCTGACCCTGAA |
| | GTTCATCTGCACCACCGGCAAGCTGCCCGTGCCCTGGCCCACCCT |
| | CGTGACCACCCTGTCCTGGGGCGTGCAGTGCTTCGCCCGCTACCC |
| | CGACCACATGAAGCAGCACGACTTCTTCAAGTCCGCCATGCCCGA |
| | AGGCTACGTCCAGGAGCGCACCATCTTCTTCAAGGACGACGGCAA |
| | CTACAAGACCCGCGCCGAGGTGAAGTTCGAGGGCGACACCCTGGT |
| | GAACCGCATCGAGCTGAAGGGCATCGACTTCAAGGAGGACGGCAA |
| | CATCCTGGGGCACAAGCTGGAGTACAACTACTTTAGCGACAACGT |
| | CTATATCACCGCCGACAAGCAGAAGAACGGCATCAAGGCCAACTT |
| | CAAGATCCGCCACAACATCGAGGACGGCGGCGTGCAGCTCGCCGA |
| | CCACTACCAGCAGAACACCCCCATCGGCGACGGCCCCGTGCTGCT |
| | GCCCGACAACCACTACCTGAGCACCCAGTCCAAGCTGAGCAAAGA |
| | CCCCAACGAGAAGCGCGATCACATGGTCCTGCTGGAGTTCGTGAC |
| | CGCCGCCGGGATCACTCTCGGCATGGACGAGCTGTACAAGTAAAA |
| | TCAACCTCTGGATTACAAAATTTGTGAAAGATTGACTGGTATTCT |
| | TAACTATGTTGCTCCTTTTACGCTATGTGGATACGCTGCTTTAAT |
| | GCCTTTGTATCATGTTAACTAAACTTGTTTATTGCAGCTTATAAT |
| | GGTTACAAATAAAGCAATAGCATCACAAATTTCACAAATAAAGCA |
| | TTTTTTTCACTGCATTCTAGTTGTGGTTTGTCCAAACTCATCAAT |
| | GTATCTTATCATGTCTGGAATTGACTCAAATGATGTCAATTAGTC |
| | TATCAGAAGCTCATCTGGTCTCCCTTCCGGGGGACAAGACATCCC |
| | TGTTTAATATTTAAACAGCAGTGTTCCCAAACTGGGTTCTTATAT |
| | CCCTTGCTCTGGTCAACCAGGTTGCAGGGTTTCCTGTCCTCACAG |
| | GAACGAAGTCCCTAAAGAAACAGTGGCAGCCAGGTTTAGCCCCGG |
| | AATTGACTGGATTCCTTTTTTAGGGCCCATTGGTATGGCTTTTTC |
| | CCCGTATCCCCCCAGGTGTCTGCAGGCTCAAAGAGCAGCGAGAAG |
| | CGTTCAGAGGAAAGCGATCCCGTGCCACCTTCCCCGTGCCCGGGC |
| | TGTCCCCGCACGCTGCCGGCTCGGGGATGCGGGGGGAGCGCCGGA |
| | CCGGAGCGGAGCCCCGGGCGGCTCGCTGCTGCCCCCTAGCGGGGG |
| | AGGGACGTAATTACATCCCTGGGGGCTTTGGGGGGGGGCTGTCCC |
| | TGATATCTATAACAAGAAAATATATATATAATAAGTTATCACGTA |
| | AGTAGAACATGAAATAACAATATAATTATCGTATGAGTTAAATCT |
| | TAAAAGTCACGTAAAAGATAATCATGCGTCATTTTGACTCACGCG |
| | GTCGTTATAGTTCAAAATCAGTGACACTTACCGCATTGACAAGCA |
| | CGCCTCACGGGAGCTCCAAGCGGCGACTGAGATGTCCTAAATGCA |
| | CAGCGACGGATTCGCGCTATTTAGAAAGAGAGAGCAATATTTCAA |
| | GAATGCATGCGTCAATTTTACGCAGACTATCTTTCTAGGGTTAAT |
| | CTAGCTGCATCAGGATCATATCGTCGGGTCTTTTTTCCGGCTCAG |
| | TCATCGCCCAAGCTGGCGCTATCTGGGCATCGGGGAGGAAGAAGC |
| | CCGTGCCTTTTCCCGCGAGGTTGAAGCGGCATGGAAAGAGTTTGC |
| | CGAGGATGACTGCTGCTGCATTGACGTTGAGCGAAAACGCACGTT |
| | TACCATGATGATTCGGGAAGGTGTGGCCATGCACGCCTTTAACGG |
| | TGAACTGTTCGTTCAGGCCACCTGGGATACCAGTTCGTCGCGGCT |
| | TTTCCGGACACAGTTCCGGATGGTCAGCCCGAAGCGCATCAGCAA |
| | CCCGAACAATACCGGCGACAGCCGGAACTGCCGTGCCGGTGTGCA |
| | GATTAATGACAGCGGTGCGGCGCTGGGATATTACGTCAGCGAGGA |
| | CGGGTATCCTGGCTGGATGCCGCAGAAATGGACATGGATACCCCG |
| | TGAGTTACCCGGCGGGCGCGCTTGGCGTAATCATGGTCATAGCTG |
| | TTTCCTGTGTGAAATTGTTATCCGCTCACAATTCCACACAACATA |
| | CGAGCCGGAAGCATAAAGTGTAAAGCCTGGGGTGCCTAATGAGTG |
| | AGCTAACTCACATTAATTGCGTTGCGCTCACTGCCCGCTTTCCAG |
| | TCGGGAAACCTGTCGTGCCAGCTGCATTAATGAATCGGCCAACGC |
| | GCGGGGAGAGGCGGTTTGCGTATTGGGCGCTCTTCCGCTTCCTCG |
| | CTCACTGACTCGCTGCGCTCGGTCGTTCGGCTGCGGCGAGCGGTA |
| | TCAGCTCACTCAAAGGCGGTAATACGGTTATCCACAGAATCAGGG |
| | GATAACGCAGGAAAGAACATGTGAGCAAAAGGCCAGCAAAAGGCC |
| | AGGAACCGTAAAAAGGCCGCGTTGCTGGCGTTTTTCCATAGGCTC |
| | CGCCCCCCTGACGAGCATCACAAAAATCGACGCTCAAGTCAGAGG |
| | TGGCGAAACCCGACAGGACTATAAAGATACCAGGCGTTTCCCCCT |
| | GGAAGCTCCCTCGTGCGCTCTCCTGTTCCGACCCTGCCGCTTACC |
| | GGATACCTGTCCGCCTTTCTCCCTTCGGGAAGCGTGGCGCTTTCT |
| | CATAGCTCACGCTGTAGGTATCTCAGTTCGGTGTAGGTCGTTCGC |
| | TCCAAGCTGGGCTGTGTGCACGAACCCCCCGTTCAGCCCGACCGC |
| | TGCGCCTTATCCGGTAACTATCGTCTTGAGTCCAACCCGGTAAGA |
| | CACGACTTATCGCCACTGGCAGCAGCCACTGGTAACAGGATTAGC |
| | AGAGCGAGGTATGTAGGCGGTGCTACAGAGTTCTTGAAGTGGTGG |
| | CCTAACTACGGCTACACTAGAAGGACAGTATTTGGTATCTGCGCT |
| | CTGCTGAAGCCAGTTACCTTCGGAAAAAGAGTTGGTAGCTCTTGA |
| | TCCGGCAAACAAACCACCGCTGGTAGCGGTGGTTTTTTTGTTTGC |
| | AAGCAGCAGATTACGCGCAGAAAAAAAGGATCTCAAGAAGATCCT |
| | TTGATCTTTTCTACGGGGTCTGACGCTCAGTGGAACGAAAACTCA |
| | CGTTAAGGGATTTTGGTCATGAGATTATCAAAAAGGATCTTCACC |
| | TAGATCCTTTTAAATTAAAAATGAAGTTTTAAATCAATCTAAAGT |
| | ATATATGAGTAAACTTGGTCTGACAGTTACCAATGCTTAATCAGT |
| | GAGGCACCTATCTCAGCGATCTGTCTATTTCGTTCATCCATAGTT |
| | GCCTGACTCCCCGTCGTGTAGATAACTACGATACGGGAGGGCTTA |
| | CCATCTGGCCCCAGTGCTGCAATGATACCGCGAGACCCACGCTCA |
| | CCGGCTCCAGATTTATCAGCAATAAACCAGCCAGCCGGAAGGGCC |
| | GAGCGCAGAAGTGGTCCTGCAACTTTATCCGCCTCCATCCAGTCT |
| | ATTAATTGTTGCCGGGAAGCTAGAGTAAGTAGTTCGCCAGTTAAT |
| | AGTTTGCGCAACGTTGTTGCCATTGCTACAGGCATCGTGGTGTCA |
| | CGCTCGTCGTTTGGTATGGCTTCATTCAGCTCCGGTTCCCAACGA |
| | TCAAGGCGAGTTACATGATCCCCCATGTTGTGCAAAAAAGCGGTT |
| | AGCTCCTTCGGTCCTCCGATCGTTGTCAGAAGTAAGTTGGCCGCA |
| | GTGTTATCACTCATGGTTATGGCAGCACTGCATAATTCTCTTACT |
| | GTCATGCCATCCGTAAGATGCTTTTCTGTGACTGGTGAGTACTCA |
| | ACCAAGTCATTCTGAGAATAGTGTATGCGGCGACCGAGTTGCTCT |
| | TGCCCGGCGTCAATACGGGATAATACCGCGCCACATAGCAGAACT |
| | TTAAAAGTGCTCATCATTGGAAAACGTTCTTCGGGGCGAAAACTC |
| | TCAAGGATCTTACCGCTGTTGAGATCCAGTTCGATGTAACCCACT |
| | CGTGCACCCAACTGATCTTCAGCATCTTTTACTTTCACCAGCGTT |
| | TCTGGGTGAGCAAAAACAGGAAGGCAAAATGCCGCAAAAAAGGGA |
| | ATAAGGGCGACACGGAAATGTTGAATACTCAT (SEQ ID NO: |
| | 84) |
| 5′UTR | MDYKDDDDK*AAGPTDGR (SEQ ID NO: 85 and 351) |
| FLAG ORF | MDYKDDDDK (SEQ ID NO: 86) |
| Feature 42 | MMMINKQLDQRTDASAKDPRVPVAT (SEQ ID NO: 349) |
| Citrine | MVSKGEELFTGVVPILVELDGDVNGHKFSVSGEGEGDATYGKLTL |
| | KFICTTGKLPVPWPTLVTTFGYGLMCFARYPDHMKQHDFFKSAMP |
| | EGYVQERTIFFKDDGNYKTRAEVKFEGDTLVNRIELKGIDFKEDG |
| | NILGHKLEYNYNSHNVYIMADKQKNGIKVNFKIRHNIEDGSVQLA |
| | DHYQQNTPIGDGPVLLPDNHYLSYQSALSKDPNEKRDHMVLLEFV |
| | TAAGITLGMDELYPYDVPDYA (SEQ ID NO: 87) |
| HA (human | YPYDVPDYA (SEQ ID NO: 88) |
| influenza | |
| hemagglutinin) | |
| epitope tag | |
| Mod SDHA 3′UTR | AYVHLRALTCACEDQFLR*VLRFLK*QDSPHGIPLITGILDLIAL |
| | FSK (SEQ ID NOs: 89 and 352-353) |
| rtTA | MSRLDKSKVINGALELLNGVGIEGLTTRKLAQKLGVEQPTLYWHV |
| | KNKRALLDALPIEMLDRHHTHFCPLEGESWQDFLRNNAKSFRCAL |
| | LSHRDGAKVHLGTRPTEKQYETLENQLAFLCQQGFSLENALYALS |
| | AVGHFTLGCVLEEQEHQVAKEERETPTTDSMPPLLRQAIELFDRQ |
| | GAEPAFLFGLELIICGLEKQLKCESGGPADALDDFDLDMLPADAL |
| | DDFDLDMLPADALDDFDLDMLPG (SEQ ID NO: 90) |
| PB-PGK-(5UTR- | ACTCTTCCTTTTTCAATATTATTGAAGCATTTATCAGGGTTATTG |
| uORF)-Citrine- | TCTCATGAGCGGATACATATTTGAATGTATTTAGAAAAATAAACA |
| U6-crRNA13b- | AATAGGGGTTCCGCGCACATTTCCCCGAAAAGTGCCACCTAAATT |
| IRES-EF-Puro- | GTAAGCGTTAATATTTTGTTAAAATTCGCGTTAAATTTTTGTTAA |
| NLS-Cherry | ATCAGCTCATTTTTTAACCAATAGGCCGAAATCGGCAAAATCCCT |
| | TATAAATCAAAAGAATAGACCGAGATAGGGTTGAGTGTTGTTCCA |
| | GTTTGGAACAAGAGTCCACTATTAAAGAACGTGGACTCCAACGTC |
| | AAAGGGCGAAAAACCGTCTATCAGGGCGATGGCCCACTACGTGAA |
| | CCATCACCCTAATCAAGTTTTTTGGGGTCGAGGTGCCGTAAAGCA |
| | CTAAATCGGAACCCTAAAGGGAGCCCCCGATTTAGAGCTTGACGG |
| | GGAAAGCCGGCGAACGTGGCGAGAAAGGAAGGGAAGAAAGCGAAA |
| | GGAGCGGGCGCTAGGGCGCTGGCAAGTGTAGCGGTCACGCTGCGC |
| | GTAACCACCACACCCGCCGCGCTTAATGCGCCGCTACAGGGCGCG |
| | TCCCATTCGCCATTCAGGCTGCGCAACTGTTGGGAAGGGCGATCG |
| | GTGCGGGCCTCTTCGCTATTACGCCAGCTGGCGAAAGGGGGATGT |
| | GCTGCAAGGCGATTAAGTTGGGTAACGCCAGGGTTTTCCCAGTCA |
| | CGACGTTGTAAAACGACGGCCAGTGAGCGCGCCTCGTTCATTCAC |
| | GTTTTTGAACCCGTGGAGGACGGGCAGACTCGCGGTGCAAATGTG |
| | TTTTACAGCGTGATGGAGCAGATGAAGATGCTCGACACGCTGCAG |
| | AACACGCAGCTAGATTAACCCTAGAAAGATAATCATATTGTGACG |
| | TACGTTAAAGATAATCATGTGTAAAATTGACGCATGTGTTTTATC |
| | GGTCTGTATATCGAGGTTTATTTATTAATTTGAATAGATATTAAG |
| | TTTTATTATATTTACACTTACATACTAATAATAAATTCAACAAAC |
| | AATTTATTTATGTTTATTTATTTATTAAAAAAAACAAAAACTCAA |
| | AATTTCTTCTATAAAGTAACAAAACTTTTATGAGGGACAGCCCCC |
| | CCCCAAAGCCCCCAGGGATGTAATTACGTCCCTCCCCCGCTAGGG |
| | GGCAGCAGCGAGCCGCCCGGGGCTCCGCTCCGGTCCGGCGCTCCC |
| | CCCGCATCCCCGAGCCGGCAGCGTGCGGGGACAGCCCGGGCACGG |
| | GGAAGGTGGCACGGGATCGCTTTCCTCTGAACGCTTCTCGCTGCT |
| | CTTTGAGCCTGCAGACACCTGGGGGGATACGGGGAAAAGGCCTCC |
| | ACGGCCACTAGTACTTTCACTTTTCTCTATCACTGATAGGGAGTG |
| | GTAAACTCGACTTTCACTTTTCTCTATCACTGATAGGGAGTGGTA |
| | AACTCGACTTTCACTTTTCTCTATCACTGATAGGGAGTGGTAAAC |
| | TCGACTTTCACTTTTCTCTATCACTGATAGGGAGTGGTAAACTCG |
| | ACTTTCACTTTTCTCTATCACTGATAGGGAGTGGTAAACTCGACT |
| | TTCACTTTTCTCTATCACTGATAGGGAGTGGTAAACTCGACTTTC |
| | ACTTTTCTCTATCACTGATAGGGAGTGGTAAACTCGACCTATATA |
| | AGCAGAGCTCGTTTAGTGAACCGTCAGATCGCCTGGAGACGCCAT |
| | CCACGCTGTTTTGACCTCCATAGAAGACACCGGGACCGATCCAGC |
| | CTCCGCGGCCCCGAATTCATGGATTATAAAGATGATGATGATAAA |
| | TAAGCAGCTGGACCAACGGACGGACGCCAGCGCTAAGGATCCCCG |
| | GGTACCGGTCGCCACCATGGTGAGCAAGGGCGAGGAGCTGTTCAC |
| | CGGGGTGGTGCCCATCCTGGTCGAGCTGGACGGCGACGTAAACGG |
| | CCACAAGTTCAGCGTGTCCGGCGAGGGCGAGGGCGATGCCACCTA |
| | CGGCAAGCTGACCCTGAAGTTCATCTGCACCACCGGCAAGCTGCC |
| | CGTGCCCTGGCCCACCCTCGTGACCACCTTCGGCTACGGCCTGAT |
| | GTGCTTCGCCCGCTACCCCGACCACATGAAGCAGCACGACTTCTT |
| | CAAGTCCGCCATGCCCGAAGGCTACGTCCAGGAGCGCACCATCTT |
| | CTTCAAGGACGACGGCAACTACAAGACCCGCGCCGAGGTGAAGTT |
| | CGAGGGCGACACCCTGGTGAACCGCATCGAGCTGAAGGGCATCGA |
| | CTTCAAGGAGGACGGCAACATCCTGGGGCACAAGCTGGAGTACAA |
| | CTACAACAGCCACAACGTCTATATCATGGCCGACAAGCAGAAGAA |
| | CGGCATCAAGGTGAACTTCAAGATCCGCCACAACATCGAGGACGG |
| | CAGCGTGCAGCTCGCCGACCACTACCAGCAGAACACCCCCATCGG |
| | CGACGGCCCCGTGCTGCTGCCCGACAACCACTACCTGAGCTACCA |
| | GTCCGCCCTGAGCAAAGACCCCAACGAGAAGCGCGATCACATGGT |
| | CCTGCTGGAGTTCGTGACCGCCGCCGGGATCACTCTCGGCATGGA |
| | CGAGCTGTACCCATACGATGTTCCAGATTACGCTTAAGCTAGCGC |
| | ATATGTCCACTTAAGGGCGCTGACATGCGCATGTGAGGATCAATT |
| | CTTACGCTGAGTACTTCGATTCCTCAAATAGCAAGACAGCCCACA |
| | TGGCATTCCACTTATCACTGGCATCCTAGATCTGATAGCTTTGTT |
| | CTCAAAGTCTCGAGAAATTCGAATTTAAATCGACGCGTGCCTCGA |
| | CTGTGCCTTCTAGTTGCCAGCCATCTGTTGTTTGCCCCTCCCCCG |
| | TGCCTTCCTTGACCCTGGAAGGTGCCACTCCCACTGTCCTTTCCT |
| | AATAAAATGAGGAAATTGCATCGCATTGTCTGAGTAGGTGTCATT |
| | CTATTCTGGGGGGTGGGGTGGGGCAGGACAGCAAGGGGGAGGATT |
| | GGGAAGACAATAGCAGGCATGCTGGGGAAATAAAGCAAAAAAAAA |
| | AATATCATCGTGTTCTTCAAAGGAAAACCACGTCCCCGTGGTTCG |
| | GGGGGCCTAGACGTTTTTTTAACCTCGACTAAACACATGTAAAGC |
| | ATGTGCACCGAGGCCCCAGATCAGATCCCATACAATGGGGTACCT |
| | TCTGGGCATCCTTCAGCCCCTTGTTGAATACGCTTGAGGAGAGCC |
| | ATTTGACTCTTTCCACAACTATCCAACTCACAACGTGGCACTGGG |
| | GTTGTGCCGCCTTTGCAGGTGTATCTTATACACGTGGCTTTTGGC |
| | CGCAGAGGCACCTGTCGCCAGGTGGGGGGTTCCGCTGCCTGCAAA |
| | GGGTCGCTACAGACGTTGTTTGTCTTCAAGAAGCTTCCAGAGGAA |
| | CTGCTTCCTTCACGACATTCAACAGACCTTGCATTCCTTTGGCGA |
| | GAGGGGAAAGACCCCTAGGAATGCTCGTCAAGAAGACAGGGCCAG |
| | GTTTCCGGGCCCTCACATTGCCAAAAGACGGCAATATGGTGGAAA |
| | ATAACATATAGACAAACGCACACCGGCCTTATTCCAAGCGGCTTC |
| | GGCCAGTAACGTTAGGGGGGGGGGAGGGAGAGGGGTCGACGTTGT |
| | AATAGCCCCTCAAAACTGGACCTTCCACAACTAGTGTTCTCGAAC |
| | ATGGCATTGGGAACACGGTGTTTCGTCCTTTCCACAAGATATATA |
| | AAGCCAAGAAATCGAAATACTTTCAAGTTACGGTAAGCATATGAT |
| | AGTCCATTTTAAAACATAATTTTAAAACTGCAAACTACCCAAGAA |
| | ATTATTACTTTCTACGTCACGTATTTTGTACTAATATCTTTGTGT |
| | TTACAGTCAAATTAATTCTAATTATCTCTCTAACAGCCTTGTATC |
| | GTATATGCAAATATGAAGGAATCATGGGAAATAGGCCCTCTTCCT |
| | GCCCGACCTCGCGGCCGCGAAGGATCTGCGATCGCTCCGGTGCCC |
| | GTCAGTGGGCAGAGCGCACATCGCCCACAGTCCCCGAGAAGTTGG |
| | GGGGAGGGGTCGGCAATTGAACGGGTGCCTAGAGAAGGTGGCGCG |
| | GGGTAAACTGGGAAAGTGATGTCGTGTACTGGCTCCGCCTTTTTC |
| | CCGAGGGTGGGGGAGAACCGTATATAAGTGCAGTAGTCGCCGTGA |
| | ACGTTCTTTTTCGCAACGGGTTTGCCGCCAGAACACAGCTGAAGC |
| | TTCGAGGGGCTCGCATCTCTCCTTCACGCGCCCGCCGCCCTACCT |
| | GAGGCCGCCATCCACGCCGGTTGAGTCGCGTTCTGCCGCCTCCCG |
| | CCTGTGGTGCCTCCTGAACTGCGTCCGCCGTCTAGGTAAGTTTAA |
| | AGCTCAGGTCGAGACCGGGCCTTTGTCCGGCGCTCCCTTGGAGCC |
| | TACCTAGACTCAGCCGGCTCTCCACGCTTTGCCTGACCCTGCTTG |
| | CTCAACTCTACGTCTTTGTTTCGTTTTCTGTTCTGCGCCGTTACA |
| | GATCCAAGCTGTGACCGGCGCCTACGCTAGATGACCGAGTACAAG |
| | CCCACGGTGCGCCTCGCCACCCGCGACGACGTCCCCAGGGCCGTA |
| | CGCACCCTCGCCGCCGCGTTCGCCGACTACCCCGCCACGCGCCAC |
| | ACCGTCGATCCGGACCGCCACATCGAGCGGGTCACCGAGCTGCAA |
| | GAACTCTTCCTCACGCGCGTCGGGCTCGACATCGGCAAGGTGTGG |
| | GTCGCGGACGACGGCGCCGCGGTGGCGGTCTGGACCACGCCGGAG |
| | AGCGTCGAAGCGGGGGCGGTGTTCGCCGAGATCGGCCCGCGCATG |
| | GCCGAGTTGAGCGGTTCCCGGCTGGCCGCGCAGCAACAGATGGAA |
| | GGCCTCCTGGCGCCGCACCGGCCCAAGGAGCCCGCGTGGTTCCTG |
| | GCCACCGTCGGCGTCTCGCCCGACCACCAGGGCAAGGGTCTGGGC |
| | AGCGCCGTCGTGCTCCCCGGAGTGGAGGCGGCCGAGCGCGCCGGG |
| | GTGCCCGCCTTCCTGGAGACCTCCGCGCCCCGCAACCTCCCCTTC |
| | TACGAGCGGCTCGGCTTCACCGTCACCGCCGACGTCGAGGTGCCC |
| | GAAGGACCGCGCACCTGGTGCATGACCCGCAAGCCCGGTGCCGGA |
| | AGCGGAGCTACTAACTTCAGCCTGCTGAAGCAGGCTGGAGACGTG |
| | GAGGAGAACCCTGGACCTATGTCTAGACTGGACAAGAGCAAAGTC |
| | ATAAACGGCGCTCTGGAATTACTCAATGGAGTCGGTATCGAAGGC |
| | CTGACGACAAGGAAACTCGCTCAAAAGCTGGGAGTTGAGCAGCCT |
| | ACCCTGTACTGGCACGTGAAGAACAAGCGGGCCCTGCTCGATGCC |
| | CTGCCAATCGAGATGCTGGACAGGCATCATACCCACTTCTGCCCC |
| | CTGGAAGGCGAGTCATGGCAAGACTTTCTGCGGAACAACGCCAAG |
| | TCATTCCGCTGTGCTCTCCTCTCACATCGCGACGGGGCTAAAGTG |
| | CATCTCGGCACCCGCCCAACAGAGAAACAGTACGAAACCCTGGAA |
| | AATCAGCTCGCGTTCCTGTGTCAGCAAGGCTTCTCCCTGGAGAAC |
| | GCACTGTACGCTCTGTCCGCCGTGGGCCACTTTACACTGGGCTGC |
| | GTATTGGAGGAACAGGAGCATCAAGTAGCAAAAGAGGAAAGAGAG |
| | ACACCTACCACCGATTCTATGCCCCCACTTCTGAGACAAGCAATT |
| | GAGCTGTTCGACCGGCAGGGAGCCGAACCTGCCTTCCTTTTCGGC |
| | CTGGAACTAATCATATGTGGCCTGGAGAAACAGCTAAAGTGCGAA |
| | AGCGGCGGGCCGGCCGACGCCCTTGACGATTTTGACTTAGACATG |
| | CTCCCAGCCGATGCCCTTGACGACTTTGACCTTGATATGCTGCCT |
| | GCTGACGCTCTTGACGATTTTGACCTTGACATGCTCCCCGGGTAA |
| | CTAAGTAACCCTCTCCCTCCCCCCCCCCTAACGTTACTGGCCGAA |
| | GCCGCTTGGAATAAGGCCGGTGTGCGTTTGTCTATATGTTATTTT |
| | CCACCATATTGCCGTCTTTTGGCAATGTGAGGGCCCGGAAACCTG |
| | GCCCTGTCTTCTTGACGAGCATTCCTAGGGGTCTTTCCCCTCTCG |
| | CCAAAGGAATGCAAGGTCTGTTGAATGTCGTGAAGGAAGCAGTTC |
| | CTCTGGAAGCTTCTTGAAGACAAACAACGTCTGTAGCGACCCTTT |
| | GCAGGCAGCGGAACCCCCCACCTGGCGACAGGTGCCTCTGCGGCC |
| | AAAAGCCACGTGTATAAGATACACCTGCAAAGGCGGCACAACCCC |
| | AGTGCCACGTTGTGAGTTGGATAGTTGTGGAAAGAGTCAAATGGC |
| | TCTCCTCAAGCGTATTCAACAAGGGGCTGAAGGATGCCCAGAAGG |
| | TACCCCATTGTATGGGATCTGATCTGGGGCCTCGGTGCACATGCT |
| | TTACATGTGTTTAGTCGAGGTTAAAAAAACGTCTAGGCCCCCCGA |
| | ACCACGGGGACGTGGTTTTCCTTTGAAAAACACGATGATAATATG |
| | GCCACAACCATGGTCTCTAAAGGAGGTTCGTCCGACGACGAAGCA |
| | ACAGCGGACTCGCAGCACGCCGCACCTCCTAAGAAGAAAAGGAAG |
| | GTAGGGGATCCCCGGGTACCGGTCGCCACCATGGCCATCATCAAG |
| | GAGTTCATGCGCTTCAAGGTGCACATGGAGGGCTCCGTGAACGGC |
| | CACGAGTTCGAGATCGAGGGCGAGGGCGAGGGCCGCCCCTACGAG |
| | GGCACCCAGACCGCCAAGCTGAAGGTGACCAAGGGTGGCCCCCTG |
| | CCCTTCGCCTGGGACATCCTGTCCCCTCAGTTCATGTACGGCTCC |
| | AAGGCCTACGTGAAGCACCCCGCCGACATCCCCGACTACTTGAAG |
| | CTGTCCTTCCCCGAGGGCTTCAAGTGGGAGCGCGTGATGAACTTC |
| | GAGGACGGCGGCGTGGTGACCGTGACCCAGGACTCCTCCCTGCAG |
| | GACGGCGAGTTCATCTACAAGGTGAAGCTGCGCGGCACCAACTTC |
| | CCCTCCGACGGCCCCGTAATGCAGAAGAAGACCATGGGCTGGGAG |
| | GCCTCCTCCGAGCGGATGTACCCCGAGGACGGCGCCCTGAAGGGC |
| | GAGATCAAGCAGAGGCTGAAGCTGAAGGACGGCGGCCACTACGAC |
| | GCTGAGGTCAAGACCACCTACAAGGCCAAGAAGCCCGTGCAGCTG |
| | CCCGGCGCCTACAACGTCAACATCAAGTTGGACATCACCTCCCAC |
| | AACGAGGACTACACCATCGTGGAACAGTACGAACGCGCCGAGGGC |
| | CGCCACTCCACCGGCGGCATGGACGAGCTGTACAAGTAAAATCAA |
| | CCTCTGGATTACAAAATTTGTGAAAGATTGACTGGTATTCTTAAC |
| | TATGTTGCTCCTTTTACGCTATGTGGATACGCTGCTTTAATGCCT |
| | TTGTATCATGCGTTAACTAAACTTGTTTATTGCAGCTTATAATGG |
| | TTACAAATAAAGCAATAGCATCACAAATTTCACAAATAAAGCATT |
| | TTTTTCACTGCATTCTAGTTGTGGTTTGTCCAAACTCATCAATGT |
| | ATCTTATCATGTCTGGAATTGACTCAAATGATGTCAATTAGTCTA |
| | TCAGAAGCTCATCTGGTCTCCCTTCCGGGGGACAAGACATCCCTG |
| | TTTAATATTTAAACAGCAGTGTTCCCAAACTGGGTTCTTATATCC |
| | CTTGCTCTGGTCAACCAGGTTGCAGGGTTTCCTGTCCTCACAGGA |
| | ACGAAGTCCCTAAAGAAACAGTGGCAGCCAGGTTTAGCCCCGGAA |
| | TTGACTGGATTCCTTTTTTAGGGCCCATTGGTATGGCTTTTTCCC |
| | CGTATCCCCCCAGGTGTCTGCAGGCTCAAAGAGCAGCGAGAAGCG |
| | TTCAGAGGAAAGCGATCCCGTGCCACCTTCCCCGTGCCCGGGCTG |
| | TCCCCGCACGCTGCCGGCTCGGGGATGCGGGGGGAGCGCCGGACC |
| | GGAGCGGAGCCCCGGGCGGCTCGCTGCTGCCCCCTAGCGGGGGAG |
| | GGACGTAATTACATCCCTGGGGGCTTTGGGGGGGGGCTGTCCCTG |
| | ATATCTATAACAAGAAAATATATATATAATAAGTTATCACGTAAG |
| | TAGAACATGAAATAACAATATAATTATCGTATGAGTTAAATCTTA |
| | AAAGTCACGTAAAAGATAATCATGCGTCATTTTGACTCACGCGGT |
| | CGTTATAGTTCAAAATCAGTGACACTTACCGCATTGACAAGCACG |
| | CCTCACGGGAGCTCCAAGCGGCGACTGAGATGTCCTAAATGCACA |
| | GCGACGGATTCGCGCTATTTAGAAAGAGAGAGCAATATTTCAAGA |
| | ATGCATGCGTCAATTTTACGCAGACTATCTTTCTAGGGTTAATCT |
| | AGCTGCATCAGGATCATATCGTCGGGTCTTTTTTCCGGCTCAGTC |
| | ATCGCCCAAGCTGGCGCTATCTGGGCATCGGGGAGGAAGAAGCCC |
| | GTGCCTTTTCCCGCGAGGTTGAAGCGGCATGGAAAGAGTTTGCCG |
| | AGGATGACTGCTGCTGCATTGACGTTGAGCGAAAACGCACGTTTA |
| | CCATGATGATTCGGGAAGGTGTGGCCATGCACGCCTTTAACGGTG |
| | AACTGTTCGTTCAGGCCACCTGGGATACCAGTTCGTCGCGGCTTT |
| | TCCGGACACAGTTCCGGATGGTCAGCCCGAAGCGCATCAGCAACC |
| | CGAACAATACCGGCGACAGCCGGAACTGCCGTGCCGGTGTGCAGA |
| | TTAATGACAGCGGTGCGGCGCTGGGATATTACGTCAGCGAGGACG |
| | GGTATCCTGGCTGGATGCCGCAGAAATGGACATGGATACCCCGTG |
| | AGTTACCCGGCGGGCGCGCTTGGCGTAATCATGGTCATAGCTGTT |
| | TCCTGTGTGAAATTGTTATCCGCTCACAATTCCACACAACATACG |
| | AGCCGGAAGCATAAAGTGTAAAGCCTGGGGTGCCTAATGAGTGAG |
| | CTAACTCACATTAATTGCGTTGCGCTCACTGCCCGCTTTCCAGTC |
| | GGGAAACCTGTCGTGCCAGCTGCATTAATGAATCGGCCAACGCGC |
| | GGGGAGAGGCGGTTTGCGTATTGGGCGCTCTTCCGCTTCCTCGCT |
| | CACTGACTCGCTGCGCTCGGTCGTTCGGCTGCGGCGAGCGGTATC |
| | AGCTCACTCAAAGGCGGTAATACGGTTATCCACAGAATCAGGGGA |
| | TAACGCAGGAAAGAACATGTGAGCAAAAGGCCAGCAAAAGGCCAG |
| | GAACCGTAAAAAGGCCGCGTTGCTGGCGTTTTTCCATAGGCTCCG |
| | CCCCCCTGACGAGCATCACAAAAATCGACGCTCAAGTCAGAGGTG |
| | GCGAAACCCGACAGGACTATAAAGATACCAGGCGTTTCCCCCTGG |
| | AAGCTCCCTCGTGCGCTCTCCTGTTCCGACCCTGCCGCTTACCGG |
| | ATACCTGTCCGCCTTTCTCCCTTCGGGAAGCGTGGCGCTTTCTCA |
| | TAGCTCACGCTGTAGGTATCTCAGTTCGGTGTAGGTCGTTCGCTC |
| | CAAGCTGGGCTGTGTGCACGAACCCCCCGTTCAGCCCGACCGCTG |
| | CGCCTTATCCGGTAACTATCGTCTTGAGTCCAACCCGGTAAGACA |
| | CGACTTATCGCCACTGGCAGCAGCCACTGGTAACAGGATTAGCAG |
| | AGCGAGGTATGTAGGCGGTGCTACAGAGTTCTTGAAGTGGTGGCC |
| | TAACTACGGCTACACTAGAAGGACAGTATTTGGTATCTGCGCTCT |
| | GCTGAAGCCAGTTACCTTCGGAAAAAGAGTTGGTAGCTCTTGATC |
| | CGGCAAACAAACCACCGCTGGTAGCGGTGGTTTTTTTGTTTGCAA |
| | GCAGCAGATTACGCGCAGAAAAAAAGGATCTCAAGAAGATCCTTT |
| | GATCTTTTCTACGGGGTCTGACGCTCAGTGGAACGAAAACTCACG |
| | TTAAGGGATTTTGGTCATGAGATTATCAAAAAGGATCTTCACCTA |
| | GATCCTTTTAAATTAAAAATGAAGTTTTAAATCAATCTAAAGTAT |
| | ATATGAGTAAACTTGGTCTGACAGTTACCAATGCTTAATCAGTGA |
| | GGCACCTATCTCAGCGATCTGTCTATTTCGTTCATCCATAGTTGC |
| | CTGACTCCCCGTCGTGTAGATAACTACGATACGGGAGGGCTTACC |
| | ATCTGGCCCCAGTGCTGCAATGATACCGCGAGACCCACGCTCACC |
| | GGCTCCAGATTTATCAGCAATAAACCAGCCAGCCGGAAGGGCCGA |
| | GCGCAGAAGTGGTCCTGCAACTTTATCCGCCTCCATCCAGTCTAT |
| | TAATTGTTGCCGGGAAGCTAGAGTAAGTAGTTCGCCAGTTAATAG |
| | TTTGCGCAACGTTGTTGCCATTGCTACAGGCATCGTGGTGTCACG |
| | CTCGTCGTTTGGTATGGCTTCATTCAGCTCCGGTTCCCAACGATC |
| | AAGGCGAGTTACATGATCCCCCATGTTGTGCAAAAAAGCGGTTAG |
| | CTCCTTCGGTCCTCCGATCGTTGTCAGAAGTAAGTTGGCCGCAGT |
| | GTTATCACTCATGGTTATGGCAGCACTGCATAATTCTCTTACTGT |
| | CATGCCATCCGTAAGATGCTTTTCTGTGACTGGTGAGTACTCAAC |
| | CAAGTCATTCTGAGAATAGTGTATGCGGCGACCGAGTTGCTCTTG |
| | CCCGGCGTCAATACGGGATAATACCGCGCCACATAGCAGAACTTT |
| | AAAAGTGCTCATCATTGGAAAACGTTCTTCGGGGCGAAAACTCTC |
| | AAGGATCTTACCGCTGTTGAGATCCAGTTCGATGTAACCCACTCG |
| | TGCACCCAACTGATCTTCAGCATCTTTTACTTTCACCAGCGTTTC |
| | TGGGTGAGCAAAAACAGGAAGGCAAAATGCCGCAAAAAAGGGAAT |
| | AAGGGCGACACGGAAATGTTGAATACTCAT (SEQ ID NO: |
| | 91) |
| PB-TRE-V5- | ACTCTTCCTTTTTCAATATTATTGAAGCATTTATCAGGGTTATTG |
| rCas9-NLS EF | TCTCATGAGCGGATACATATTTGAATGTATTTAGAAAAATAAACA |
| NLS-Turq | AATAGGGGTTCCGCGCACATTTCCCCGAAAAGTGCCACCTAAATT |
| | GTAAGCGTTAATATTTTGTTAAAATTCGCGTTAAATTTTTGTTAA |
| | ATCAGCTCATTTTTTAACCAATAGGCCGAAATCGGCAAAATCCCT |
| | TATAAATCAAAAGAATAGACCGAGATAGGGTTGAGTGTTGTTCCA |
| | GTTTGGAACAAGAGTCCACTATTAAAGAACGTGGACTCCAACGTC |
| | AAAGGGCGAAAAACCGTCTATCAGGGCGATGGCCCACTACGTGAA |
| | CCATCACCCTAATCAAGTTTTTTGGGGTCGAGGTGCCGTAAAGCA |
| | CTAAATCGGAACCCTAAAGGGAGCCCCCGATTTAGAGCTTGACGG |
| | GGAAAGCCGGCGAACGTGGCGAGAAAGGAAGGGAAGAAAGCGAAA |
| | GGAGCGGGCGCTAGGGCGCTGGCAAGTGTAGCGGTCACGCTGCGC |
| | GTAACCACCACACCCGCCGCGCTTAATGCGCCGCTACAGGGCGCG |
| | TCCCATTCGCCATTCAGGCTGCGCAACTGTTGGGAAGGGCGATCG |
| | GTGCGGGCCTCTTCGCTATTACGCCAGCTGGCGAAAGGGGGATGT |
| | GCTGCAAGGCGATTAAGTTGGGTAACGCCAGGGTTTTCCCAGTCA |
| | CGACGTTGTAAAACGACGGCCAGTGAGCGCGCCTCGTTCATTCAC |
| | GTTTTTGAACCCGTGGAGGACGGGCAGACTCGCGGTGCAAATGTG |
| | TTTTACAGCGTGATGGAGCAGATGAAGATGCTCGACACGCTGCAG |
| | AACACGCAGCTAGATTAACCCTAGAAAGATAATCATATTGTGACG |
| | TACGTTAAAGATAATCATGTGTAAAATTGACGCATGTGTTTTATC |
| | GGTCTGTATATCGAGGTTTATTTATTAATTTGAATAGATATTAAG |
| | TTTTATTATATTTACACTTACATACTAATAATAAATTCAACAAAC |
| | AATTTATTTATGTTTATTTATTTATTAAAAAAAACAAAAACTCAA |
| | AATTTCTTCTATAAAGTAACAAAACTTTTATGAGGGACAGCCCCC |
| | CCCCAAAGCCCCCAGGGATGTAATTACGTCCCTCCCCCGCTAGGG |
| | GGCAGCAGCGAGCCGCCCGGGGCTCCGCTCCGGTCCGGCGCTCCC |
| | CCCGCATCCCCGAGCCGGCAGCGTGCGGGGACAGCCCGGGCACGG |
| | GGAAGGTGGCACGGGATCGCTTTCCTCTGAACGCTTCTCGCTGCT |
| | CTTTGAGCCTGCAGACACCTGGGGGGATACGGGGAAAAGGCCTCC |
| | ACGGCCACTAGTTCTACCGGGTAGGGGAGGCGCTTTTCCCAAGGC |
| | AGTCTGGAGCATGCGCTTTAGCAGCCCCGCTGGGCACTTGGCGCT |
| | ACACAAGTGGCCTCTGGCCTCGCACACATTCCACATCCACCGGTA |
| | GGCGCCAACCGGCTCCGTTCTTTGGTGGCCCCTTCGCGCCACCTT |
| | CTACTCCTCCCCTAGTCAGGAAGTTCCCCCCCGCCCCGCAGCTCG |
| | CGTCGTGCAGGACGTGACAAATGGAAGTAGCACGTCTCATTAGTC |
| | TCGTGCAGATGGACAGCACCGCTGAGCAATGGAAGCGGGTAGGCC |
| | TTTGGGGCAGCGGCCAATAGCAGCTTTGCTCCTTCGCTTTCTGGG |
| | CTCAGAGGCTGGGAAGGGGTGGGTCCGGGGGCGGGCTCAGGGGCG |
| | GGCTCAGGGGCGGGGCGGGCGCCCGAAGGTCCTCCGGAGGCCCGG |
| | CATTCTGCACGCTTCAAAAGCGCACGTCTGCCGCGCTGTTCTCCT |
| | CTTCCTCATCTCCGGGCCTTTCGACCTGCAGGTTAATTAAATGGG |
| | TAAGCCTATCCCTAACCCTCTCCTCGGTCTCGATTCTACGGCTAG |
| | CATGGACAAGAAGTACAGCATCGGCCTGGCCATCGGCACCAACTC |
| | TGTGGGCTGGGCCGTGATCACCGACGAGTACAAGGTGCCCAGCAA |
| | GAAATTCAAGGTGCTGGGCAACACCGACCGGCACAGCATCAAGAA |
| | GAACCTGATCGGCGCCCTGCTGTTCGACAGCGGAGAAACAGCCGA |
| | GGCCACCCGGCTGAAGAGAACCGCCAGAAGAAGATACACCAGACG |
| | GAAGAACCGGATCTGCTATCTGCAAGAGATCTTCAGCAACGAGAT |
| | GGCCAAGGTGGACGACAGCTTCTTCCACAGACTGGAAGAGTCCTT |
| | CCTGGTGGAAGAGGATAAGAAGCACGAGCGGCACCCCATCTTCGG |
| | CAACATCGTGGACGAGGTGGCCTACCACGAGAAGTACCCCACCAT |
| | CTACCACCTGAGAAAGAAACTGGTGGACAGCACCGACAAGGCCGA |
| | CCTGCGGCTGATCTATCTGGCCCTGGCCCACATGATCAAGTTCCG |
| | GGGCCACTTCCTGATCGAGGGCGACCTGAACCCCGACAACAGCGA |
| | CGTGGACAAGCTGTTCATCCAGCTGGTGCAGACCTACAACCAGCT |
| | GTTCGAGGAAAACCCCATCAACGCCAGCGGCGTGGACGCCAAGGC |
| | CATCCTGTCTGCCAGACTGAGCAAGAGCAGACGGCTGGAAAATCT |
| | GATCGCCCAGCTGCCCGGCGAGAAGAAGAATGGCCTGTTCGGCAA |
| | CCTGATTGCCCTGAGCCTGGGCCTGACCCCCAACTTCAAGAGCAA |
| | CTTCGACCTGGCCGAGGATGCCAAACTGCAGCTGAGCAAGGACAC |
| | CTACGACGACGACCTGGACAACCTGCTGGCCCAGATCGGCGACCA |
| | GTACGCCGACCTGTTTCTGGCCGCCAAGAACCTGTCCGACGCCAT |
| | CCTGCTGAGCGACATCCTGAGAGTGAACACCGAGATCACCAAGGC |
| | CCCCCTGAGCGCCTCTATGATCAAGAGATACGACGAGCACCACCA |
| | GGACCTGACCCTGCTGAAAGCTCTCGTGCGGCAGCAGCTGCCTGA |
| | GAAGTACAAAGAGATTTTCTTCGACCAGAGCAAGAACGGCTACGC |
| | CGGCTACATCGATGGCGGAGCCAGCCAGGAAGAGTTCTACAAGTT |
| | CATCAAGCCCATCCTGGAAAAGATGGACGGCACCGAGGAACTGCT |
| | CGTGAAGCTGAACAGAGAGGACCTGCTGCGGAAGCAGCGGACCTT |
| | CGACAACGGCAGCATCCCCCACCAGATCCACCTGGGAGAGCTGCA |
| | CGCCATTCTGCGGCGGCAGGAAGATTTTTACCCATTCCTGAAGGA |
| | CAACCGGGAAAAGATCGAGAAGATCCTGACCTTCCGCATCCCCTA |
| | CTACGTGGGCCCTCTGGCCAGGGGAAACAGCAGATTCGCCTGGAT |
| | GACCAGAAAGAGCGAGGAAACCATCACCCCCTGGAACTTCGAGGA |
| | AGTGGTGGACAAGGGCGCCAGCGCCCAGAGCTTCATCGAGCGGAT |
| | GACCAACTTCGATAAGAACCTGCCCAACGAGAAGGTGCTGCCCAA |
| | GCACAGCCTGCTGTACGAGTACTTCACCGTGTACAACGAGCTGAC |
| | CAAAGTGAAATACGTGACCGAGGGAATGAGAAAGCCCGCCTTCCT |
| | GAGCGGCGAGCAGAAAAAAGCCATCGTGGACCTGCTGTTCAAGAC |
| | CAACCGGAAAGTGACCGTGAAGCAGCTGAAAGAGGACTACTTCAA |
| | GAAAATCGAGTGCTTCGACTCCGTGGAAATCTCCGGCGTGGAAGA |
| | TCGGTTCAACGCCTCCCTGGGCACATACCACGATCTGCTGAAAAT |
| | TATCAAGGACAAGGACTTCCTGGACAATGAGGAAAACGAGGACAT |
| | TCTGGAAGATATCGTGCTGACCCTGACACTGTTTGAGGACAGAGA |
| | GATGATCGAGGAACGGCTGAAAACCTATGCCCACCTGTTCGACGA |
| | CAAAGTGATGAAGCAGCTGAAGCGGCGGAGATACACCGGCTGGGG |
| | CAGGCTGAGCCGGAAGCTGATCAACGGCATCCGGGACAAGCAGTC |
| | CGGCAAGACAATCCTGGATTTCCTGAAGTCCGACGGCTTCGCCAA |
| | CAGAAACTTCATGCAGCTGATCCACGACGACAGCCTGACCTTTAA |
| | AGAGGACATCCAGAAAGCCCAGGTGTCCGGCCAGGGCGATAGCCT |
| | GCACGAGCACATTGCCAATCTGGCCGGCAGCCCCGCCATTAAGAA |
| | GGGCATCCTGCAGACAGTGAAGGTGGTGGACGAGCTCGTGAAAGT |
| | GATGGGCCGGCACAAGCCCGAGAACATCGTGATCGAAATGGCCAG |
| | AGAGAACCAGACCACCCAGAAGGGACAGAAGAACAGCCGCGAGAG |
| | AATGAAGCGGATCGAAGAGGGCATCAAAGAGCTGGGCAGCCAGAT |
| | CCTGAAAGAACACCCCGTGGAAAACACCCAGCTGCAGAACGAGAA |
| | GCTGTACCTGTACTACCTGCAGAATGGGCGGGATATGTACGTGGA |
| | CCAGGAACTGGACATCAACCGGCTGTCCGACTACGATGTGGACGC |
| | TATCGTGCCTCAGAGCTTTCTGAAGGACGACTCCATCGATAACAA |
| | AGTGCTGACTCGGAGCGACAAGAACCGGGGCAAGAGCGACAACGT |
| | GCCCTCCGAAGAGGTCGTGAAGAAGATGAAGAACTACTGGCGCCA |
| | GCTGCTGAATGCCAAGCTGATTACCCAGAGGAAGTTCGACAATCT |
| | GACCAAGGCCGAGAGAGGCGGCCTGAGCGAACTGGATAAGGCCGG |
| | CTTCATCAAGAGACAGCTGGTGGAAACCCGGCAGATCACAAAGCA |
| | CGTGGCACAGATCCTGGACTCCCGGATGAACACTAAGTACGACGA |
| | GAACGACAAACTGATCCGGGAAGTGAAAGTGATCACCCTGAAGTC |
| | CAAGCTGGTGTCCGATTTCCGGAAGGATTTCCAGTTTTACAAAGT |
| | GCGCGAGATCAACAACTACCACCACGCCCACGACGCCTACCTGAA |
| | CGCCGTCGTGGGAACCGCCCTGATCAAAAAGTACCCTAAGCTGGA |
| | AAGCGAGTTCGTGTACGGCGACTACAAGGTGTACGACGTGCGGAA |
| | GATGATCGCCAAGAGCGAGCAGGAAATCGGCAAGGCTACCGCCAA |
| | GTACTTCTTCTACAGCAACATCATGAACTTTTTCAAGACCGAGAT |
| | TACCCTGGCCAACGGCGAGATCCGGAAGCGGCCTCTGATCGAGAC |
| | AAACGGCGAAACAGGCGAGATCGTGTGGGATAAGGGCCGGGACTT |
| | TGCCACCGTGCGGAAAGTGCTGTCTATGCCCCAAGTGAATATCGT |
| | GAAAAAGACCGAGGTGCAGACAGGCGGCTTCAGCAAAGAGTCTAT |
| | CCTGCCCAAGAGGAACAGCGACAAGCTGATCGCCAGAAAGAAGGA |
| | CTGGGACCCTAAGAAGTACGGCGGCTTCGACAGCCCCACCGTGGC |
| | CTATTCTGTGCTGGTGGTGGCCAAAGTGGAAAAGGGCAAGTCCAA |
| | GAAACTGAAGAGTGTGAAAGAGCTGCTGGGGATCACCATCATGGA |
| | AAGAAGCAGCTTCGAGAAGAATCCCATCGACTTTCTGGAAGCCAA |
| | GGGCTACAAAGAAGTGAAAAAGGACCTGATCATCAAGCTGCCTAA |
| | GTACTCCCTGTTCGAGCTGGAAAACGGCCGGAAGAGAATGCTGGC |
| | CTCTGCCGGCGAACTGCAGAAGGGAAACGAACTGGCCCTGCCCTC |
| | CAAATATGTGAACTTCCTGTACCTGGCCAGCCACTATGAGAAGCT |
| | GAAGGGCTCCCCCGAGGATAATGAGCAGAAACAGCTGTTTGTGGA |
| | ACAGCACAAACACTACCTGGACGAGATCATCGAGCAGATCAGCGA |
| | GTTCTCCAAGAGAGTGATCCTGGCCGACGCTAATCTGGACAAGGT |
| | GCTGAGCGCCTACAACAAGCACAGAGACAAGCCTATCAGAGAGCA |
| | GGCCGAGAATATCATCCACCTGTTTACCCTGACCAATCTGGGAGC |
| | CCCTGCCGCCTTCAAGTACTTTGACACCACCATCGACCGGAAGAG |
| | GTACACCAGCACCAAAGAGGTGCTGGACGCCACCCTGATCCACCA |
| | GAGCATCACCGGCCTGTACGAGACACGGATCGACCTGTCTCAGCT |
| | GGGAGGCGACCTCGAGTAAGCCTCGACTGTGCCTTCTAGTTGCCA |
| | GCCATCTGTTGTTTGCCCCTCCCCCGTGCCTTCCTTGACCCTGGA |
| | AGGTGCCACTCCCACTGTCCTTTCCTAATAAAATGAGGAAATTGC |
| | ATCGCATTGTCTGAGTAGGTGTCATTCTATTCTGGGGGGTGGGGT |
| | GGGGCAGGACAGCAAGGGGGAGGATTGGGAAGACAATAGCAGGCA |
| | TGCTGGGGAACGCGTTCTAGACTTAAGCAACATGCTGCTCCGCCG |
| | AAAAAGAAGAGAAAAGGTTAAGCCTCGACTGTGCCTTCTAGTTGC |
| | CAGCCATCTGTTGTTTGCCCCTCCCCCGTGCCTTCCTTGACCCTG |
| | GAAGGTGCCACTCCCACTGTCCTTTCCTAATAAAATGAGGAAATT |
| | GCATCGCATTGTCTGAGTAGGTGTCATTCTATTCTGGGGGGTGGG |
| | GTGGGGCAGGACAGCAAGGGGGAGGATTGGGAAGACAATAGCAGG |
| | CATGCTGGGGAGTGCCCGTCAGTGGGCAGAGCGCACATCGCCCAC |
| | AGTCCCCGAGAAGTTGGGGGGAGGGGTCGGCAATTGAACGGGTGC |
| | CTAGAGAAGGTGGCGCGGGGTAAACTGGGAAAGTGATGTCGTGTA |
| | CTGGCTCCGCCTTTTTCCCGAGGGTGGGGGAGAACCGTATATAAG |
| | TGCAGTAGTCGCCGTGAACGTTCTTTTTCGCAACGGGTTTGCCGC |
| | CAGAACACAGATGGTCTCTAAAGGAGGTTCGTCCGACGACGAAGC |
| | AACAGCGGACTCGCAGCACGCCGCACCTCCTAAGAAGAAAAGGAA |
| | GGTAGGGGATCCCCGGGTACCGGTCGCCACCATGGTGAGCAAGGG |
| | CGAGGAGCTGTTCACCGGGGTGGTGCCCATCCTGGTCGAGCTGGA |
| | CGGCGACGTAAACGGCCACAAGTTCAGCGTGTCCGGCGAGGGCGA |
| | GGGCGATGCCACCTACGGCAAGCTGACCCTGAAGTTCATCTGCAC |
| | CACCGGCAAGCTGCCCGTGCCCTGGCCCACCCTCGTGACCACCCT |
| | GTCCTGGGGCGTGCAGTGCTTCGCCCGCTACCCCGACCACATGAA |
| | GCAGCACGACTTCTTCAAGTCCGCCATGCCCGAAGGCTACGTCCA |
| | GGAGCGCACCATCTTCTTCAAGGACGACGGCAACTACAAGACCCG |
| | CGCCGAGGTGAAGTTCGAGGGCGACACCCTGGTGAACCGCATCGA |
| | GCTGAAGGGCATCGACTTCAAGGAGGACGGCAACATCCTGGGGCA |
| | CAAGCTGGAGTACAACTACTTTAGCGACAACGTCTATATCACCGC |
| | CGACAAGCAGAAGAACGGCATCAAGGCCAACTTCAAGATCCGCCA |
| | CAACATCGAGGACGGCGGCGTGCAGCTCGCCGACCACTACCAGCA |
| | GAACACCCCCATCGGCGACGGCCCCGTGCTGCTGCCCGACAACCA |
| | CTACCTGAGCACCCAGTCCAAGCTGAGCAAAGACCCCAACGAGAA |
| | GCGCGATCACATGGTCCTGCTGGAGTTCGTGACCGCCGCCGGGAT |
| | CACTCTCGGCATGGACGAGCTGTACAAGTAAAATCAACCTCTGGA |
| | TTACAAAATTTGTGAAAGATTGACTGGTATTCTTAACTATGTTGC |
| | TCCTTTTACGCTATGTGGATACGCTGCTTTAATGCCTTTGTATCA |
| | TGTTAACTAAACTTGTTTATTGCAGCTTATAATGGTTACAAATAA |
| | AGCAATAGCATCACAAATTTCACAAATAAAGCATTTTTTTCACTG |
| | CATTCTAGTTGTGGTTTGTCCAAACTCATCAATGTATCTTATCAT |
| | GTCTGGAATTGACTCAAATGATGTCAATTAGTCTATCAGAAGCTC |
| | ATCTGGTCTCCCTTCCGGGGGACAAGACATCCCTGTTTAATATTT |
| | AAACAGCAGTGTTCCCAAACTGGGTTCTTATATCCCTTGCTCTGG |
| | TCAACCAGGTTGCAGGGTTTCCTGTCCTCACAGGAACGAAGTCCC |
| | TAAAGAAACAGTGGCAGCCAGGTTTAGCCCCGGAATTGACTGGAT |
| | TCCTTTTTTAGGGCCCATTGGTATGGCTTTTTCCCCGTATCCCCC |
| | CAGGTGTCTGCAGGCTCAAAGAGCAGCGAGAAGCGTTCAGAGGAA |
| | AGCGATCCCGTGCCACCTTCCCCGTGCCCGGGCTGTCCCCGCACG |
| | CTGCCGGCTCGGGGATGCGGGGGGAGCGCCGGACCGGAGCGGAGC |
| | CCCGGGCGGCTCGCTGCTGCCCCCTAGCGGGGGAGGGACGTAATT |
| | ACATCCCTGGGGGCTTTGGGGGGGGGCTGTCCCTGATATCTATAA |
| | CAAGAAAATATATATATAATAAGTTATCACGTAAGTAGAACATGA |
| | AATAACAATATAATTATCGTATGAGTTAAATCTTAAAAGTCACGT |
| | AAAAGATAATCATGCGTCATTTTGACTCACGCGGTCGTTATAGTT |
| | CAAAATCAGTGACACTTACCGCATTGACAAGCACGCCTCACGGGA |
| | GCTCCAAGCGGCGACTGAGATGTCCTAAATGCACAGCGACGGATT |
| | CGCGCTATTTAGAAAGAGAGAGCAATATTTCAAGAATGCATGCGT |
| | CAATTTTACGCAGACTATCTTTCTAGGGTTAATCTAGCTGCATCA |
| | GGATCATATCGTCGGGTCTTTTTTCCGGCTCAGTCATCGCCCAAG |
| | CTGGCGCTATCTGGGCATCGGGGAGGAAGAAGCCCGTGCCTTTTC |
| | CCGCGAGGTTGAAGCGGCATGGAAAGAGTTTGCCGAGGATGACTG |
| | CTGCTGCATTGACGTTGAGCGAAAACGCACGTTTACCATGATGAT |
| | TCGGGAAGGTGTGGCCATGCACGCCTTTAACGGTGAACTGTTCGT |
| | TCAGGCCACCTGGGATACCAGTTCGTCGCGGCTTTTCCGGACACA |
| | GTTCCGGATGGTCAGCCCGAAGCGCATCAGCAACCCGAACAATAC |
| | CGGCGACAGCCGGAACTGCCGTGCCGGTGTGCAGATTAATGACAG |
| | CGGTGCGGCGCTGGGATATTACGTCAGCGAGGACGGGTATCCTGG |
| | CTGGATGCCGCAGAAATGGACATGGATACCCCGTGAGTTACCCGG |
| | CGGGCGCGCTTGGCGTAATCATGGTCATAGCTGTTTCCTGTGTGA |
| | AATTGTTATCCGCTCACAATTCCACACAACATACGAGCCGGAAGC |
| | ATAAAGTGTAAAGCCTGGGGTGCCTAATGAGTGAGCTAACTCACA |
| | TTAATTGCGTTGCGCTCACTGCCCGCTTTCCAGTCGGGAAACCTG |
| | TCGTGCCAGCTGCATTAATGAATCGGCCAACGCGCGGGGAGAGGC |
| | GGTTTGCGTATTGGGCGCTCTTCCGCTTCCTCGCTCACTGACTCG |
| | CTGCGCTCGGTCGTTCGGCTGCGGCGAGCGGTATCAGCTCACTCA |
| | AAGGCGGTAATACGGTTATCCACAGAATCAGGGGATAACGCAGGA |
| | AAGAACATGTGAGCAAAAGGCCAGCAAAAGGCCAGGAACCGTAAA |
| | AAGGCCGCGTTGCTGGCGTTTTTCCATAGGCTCCGCCCCCCTGAC |
| | GAGCATCACAAAAATCGACGCTCAAGTCAGAGGTGGCGAAACCCG |
| | ACAGGACTATAAAGATACCAGGCGTTTCCCCCTGGAAGCTCCCTC |
| | GTGCGCTCTCCTGTTCCGACCCTGCCGCTTACCGGATACCTGTCC |
| | GCCTTTCTCCCTTCGGGAAGCGTGGCGCTTTCTCATAGCTCACGC |
| | TGTAGGTATCTCAGTTCGGTGTAGGTCGTTCGCTCCAAGCTGGGC |
| | TGTGTGCACGAACCCCCCGTTCAGCCCGACCGCTGCGCCTTATCC |
| | GGTAACTATCGTCTTGAGTCCAACCCGGTAAGACACGACTTATCG |
| | CCACTGGCAGCAGCCACTGGTAACAGGATTAGCAGAGCGAGGTAT |
| | GTAGGCGGTGCTACAGAGTTCTTGAAGTGGTGGCCTAACTACGGC |
| | TACACTAGAAGGACAGTATTTGGTATCTGCGCTCTGCTGAAGCCA |
| | GTTACCTTCGGAAAAAGAGTTGGTAGCTCTTGATCCGGCAAACAA |
| | ACCACCGCTGGTAGCGGTGGTTTTTTTGTTTGCAAGCAGCAGATT |
| | ACGCGCAGAAAAAAAGGATCTCAAGAAGATCCTTTGATCTTTTCT |
| | ACGGGGTCTGACGCTCAGTGGAACGAAAACTCACGTTAAGGGATT |
| | TTGGTCATGAGATTATCAAAAAGGATCTTCACCTAGATCCTTTTA |
| | AATTAAAAATGAAGTTTTAAATCAATCTAAAGTATATATGAGTAA |
| | ACTTGGTCTGACAGTTACCAATGCTTAATCAGTGAGGCACCTATC |
| | TCAGCGATCTGTCTATTTCGTTCATCCATAGTTGCCTGACTCCCC |
| | GTCGTGTAGATAACTACGATACGGGAGGGCTTACCATCTGGCCCC |
| | AGTGCTGCAATGATACCGCGAGACCCACGCTCACCGGCTCCAGAT |
| | TTATCAGCAATAAACCAGCCAGCCGGAAGGGCCGAGCGCAGAAGT |
| | GGTCCTGCAACTTTATCCGCCTCCATCCAGTCTATTAATTGTTGC |
| | CGGGAAGCTAGAGTAAGTAGTTCGCCAGTTAATAGTTTGCGCAAC |
| | GTTGTTGCCATTGCTACAGGCATCGTGGTGTCACGCTCGTCGTTT |
| | GGTATGGCTTCATTCAGCTCCGGTTCCCAACGATCAAGGCGAGTT |
| | ACATGATCCCCCATGTTGTGCAAAAAAGCGGTTAGCTCCTTCGGT |
| | CCTCCGATCGTTGTCAGAAGTAAGTTGGCCGCAGTGTTATCACTC |
| | ATGGTTATGGCAGCACTGCATAATTCTCTTACTGTCATGCCATCC |
| | GTAAGATGCTTTTCTGTGACTGGTGAGTACTCAACCAAGTCATTC |
| | TGAGAATAGTGTATGCGGCGACCGAGTTGCTCTTGCCCGGCGTCA |
| | ATACGGGATAATACCGCGCCACATAGCAGAACTTTAAAAGTGCTC |
| | ATCATTGGAAAACGTTCTTCGGGGCGAAAACTCTCAAGGATCTTA |
| | CCGCTGTTGAGATCCAGTTCGATGTAACCCACTCGTGCACCCAAC |
| | TGATCTTCAGCATCTTTTACTTTCACCAGCGTTTCTGGGTGAGCA |
| | AAAACAGGAAGGCAAAATGCCGCAAAAAAGGGAATAAGGGCGACA |
| | CGGAAATGTTGAATACTCAT (SEQ ID NO: 92) |
| PB-PGK-(5UTR- | ACTCTTCCTTTTTCAATATTATTGAAGCATTTATCAGGGTTATTG |
| uORF)-Citrine- | TCTCATGAGCGGATACATATTTGAATGTATTTAGAAAAATAAACA |
| U6-sgRNA-IRES- | AATAGGGGTTCCGCGCACATTTCCCCGAAAAGTGCCACCTAAATT |
| EF-Puro-NLS- | GTAAGCGTTAATATTTTGTTAAAATTCGCGTTAAATTTTTGTTAA |
| Cherry | ATCAGCTCATTTTTTAACCAATAGGCCGAAATCGGCAAAATCCCT |
| | TATAAATCAAAAGAATAGACCGAGATAGGGTTGAGTGTTGTTCCA |
| | GTTTGGAACAAGAGTCCACTATTAAAGAACGTGGACTCCAACGTC |
| | AAAGGGCGAAAAACCGTCTATCAGGGCGATGGCCCACTACGTGAA |
| | CCATCACCCTAATCAAGTTTTTTGGGGTCGAGGTGCCGTAAAGCA |
| | CTAAATCGGAACCCTAAAGGGAGCCCCCGATTTAGAGCTTGACGG |
| | GGAAAGCCGGCGAACGTGGCGAGAAAGGAAGGGAAGAAAGCGAAA |
| | GGAGCGGGCGCTAGGGCGCTGGCAAGTGTAGCGGTCACGCTGCGC |
| | GTAACCACCACACCCGCCGCGCTTAATGCGCCGCTACAGGGCGCG |
| | TCCCATTCGCCATTCAGGCTGCGCAACTGTTGGGAAGGGCGATCG |
| | GTGCGGGCCTCTTCGCTATTACGCCAGCTGGCGAAAGGGGGATGT |
| | GCTGCAAGGCGATTAAGTTGGGTAACGCCAGGGTTTTCCCAGTCA |
| | CGACGTTGTAAAACGACGGCCAGTGAGCGCGCCTCGTTCATTCAC |
| | GTTTTTGAACCCGTGGAGGACGGGCAGACTCGCGGTGCAAATGTG |
| | TTTTACAGCGTGATGGAGCAGATGAAGATGCTCGACACGCTGCAG |
| | AACACGCAGCTAGATTAACCCTAGAAAGATAATCATATTGTGACG |
| | TACGTTAAAGATAATCATGTGTAAAATTGACGCATGTGTTTTATC |
| | GGTCTGTATATCGAGGTTTATTTATTTAATTTGAATAGATATTAG |
| | TTTTATTATATTTACACTTACATACTAATAATAAATTCAACAAAC |
| | AATTTATTTATGTTTATTTATTTATTAAAAAAAACAAAAACTCAA |
| | AATTTCTTCTATAAAGTAACAAAACTTTTATGAGGGACAGCCCCC |
| | CCCCAAAGCCCCCAGGGATGTAATTACGTCCCTCCCCCGCTAGGG |
| | GGCAGCAGCGAGCCGCCCGGGGCTCCGCTCCGGTCCGGCGCTCCC |
| | CCCGCATCCCCGAGCCGGCAGCGTGCGGGGACAGCCCGGGCACGG |
| | GGAAGGTGGCACGGGATCGCTTTCCTCTGAACGCTTCTCGCTGCT |
| | CTTTGAGCCTGCAGACACCTGGGGGGATACGGGGAAAAGGCCTCC |
| | ACGGCCACTAGTACTTTCACTTTTCTCTATCACTGATAGGGAGTG |
| | GTAAACTCGACTTTCACTTTTCTCTATCACTGATAGGGAGTGGTA |
| | AACTCGACTTTCACTTTTCTCTATCACTGATAGGGAGTGGTAAAC |
| | TCGACTTTCACTTTTCTCTATCACTGATAGGGAGTGGTAAACTCG |
| | ACTTTCACTTTTCTCTATCACTGATAGGGAGTGGTAAACTCGACT |
| | TTCACTTTTCTCTATCACTGATAGGGAGTGGTAAACTCGACTTTC |
| | ACTTTTCTCTATCACTGATAGGGAGTGGTAAACTCGACCTATATA |
| | AGCAGAGCTCGTTTAGTGAACCGTCAGATCGCCTGGAGACGCCAT |
| | CCACGCTGTTTTGACCTCCATAGAAGACACCGGGACCGATCCAGC |
| | CTCCGCGGCCCCGAATTCATGGATTATAAAGATGATGATGATAAA |
| | TAAGCAGCTGGACCAACGGACGGACGCCAGCGCTAAGGATCCCCG |
| | GGTACCGGTCGCCACCATGGTGAGCAAGGGCGAGGAGCTGTTCAC |
| | CGGGGTGGTGCCCATCCTGGTCGAGCTGGACGGCGACGTAAACGG |
| | CCACAAGTTCAGCGTGTCCGGCGAGGGCGAGGGCGATGCCACCTA |
| | CGGCAAGCTGACCCTGAAGTTCATCTGCACCACCGGCAAGCTGCC |
| | CGTGCCCTGGCCCACCCTCGTGACCACCTTCGGCTACGGCCTGAT |
| | GTGCTTCGCCCGCTACCCCGACCACATGAAGCAGCACGACTTCTT |
| | CAAGTCCGCCATGCCCGAAGGCTACGTCCAGGAGCGCACCATCTT |
| | CTTCAAGGACGACGGCAACTACAAGACCCGCGCCGAGGTGAAGTT |
| | CGAGGGCGACACCCTGGTGAACCGCATCGAGCTGAAGGGCATCGA |
| | CTTCAAGGAGGACGGCAACATCCTGGGGCACAAGCTGGAGTACAA |
| | CTACAACAGCCACAACGTCTATATCATGGCCGACAAGCAGAAGAA |
| | CGGCATCAAGGTGAACTTCAAGATCCGCCACAACATCGAGGACGG |
| | CAGCGTGCAGCTCGCCGACCACTACCAGCAGAACACCCCCATCGG |
| | CGACGGCCCCGTGCTGCTGCCCGACAACCACTACCTGAGCTACCA |
| | GTCCGCCCTGAGCAAAGACCCCAACGAGAAGCGCGATCACATGGT |
| | CCTGCTGGAGTTCGTGACCGCCGCCGGGATCACTCTCGGCATGGA |
| | CGAGCTGTACCCATACGATGTTCCAGATTACGCTTAAGCTAGCGC |
| | ATATGTCCACTTAAGGGCGCTGACATGCGCATGTGAGGATCAATT |
| | CTTACGCTGAGTACTTCGATTCCTCAAATAGCAAGACAGCCCACA |
| | TGGCATTCCACTTATCACTGGCATCCTAGATCTGATAGCTTTGTT |
| | CTCAAAGTCTCGAGAAATTCGAATTTAAATCGACGCGTGCCTCGA |
| | CTGTGCCTTCTAGTTGCCAGCCATCTGTTGTTTGCCCCTCCCCCG |
| | TGCCTTCCTTGACCCTGGAAGGTGCCACTCCCACTGTCCTTTCCT |
| | AATAAAATGAGGAAATTGCATCGCATTGTCTGAGTAGGTGTCATT |
| | CTATTCTGGGGGGTGGGGTGGGGCAGGACAGCAAGGGGGAGGATT |
| | GGGAAGACAATAGCAGGCATGCTGGGGAAATAAAGCAAAAAAAAA |
| | AATATCATCGTGTTCTTCAAAGGAAAACCACGTCCCCGTGGTTCG |
| | GGGGGCCTAGACGTTTTTTTAACCTCGACTAAACACATGTAAAGC |
| | ATGTGCACCGAGGCCCCAGATCAGATCCCATACAATGGGGTACCT |
| | TCTGGGCATCCTTCAGCCCCTTGTTGAATACGCTTGAGGAGAGCC |
| | ATTTGACTCTTTCCACAACTATCCAACTCACAACGTGGCACTGGG |
| | GTTGTGCCGCCTTTGCAGGTGTATCTTATACACGTGGCTTTTGGC |
| | CGCAGAGGCACCTGTCGCCAGGTGGGGGGTTCCGCTGCCTGCAAA |
| | GGGTCGCTACAGACGTTGTTTGTCTTCAAGAAGCTTCCAGAGGAA |
| | CTGCTTCCTTCACGACATTCAACAGACCTTGCATTCCTTTGGCGA |
| | GAGGGGAAAGACCCCTAGGAATGCTCGTCAAGAAGACAGGGCCAG |
| | GTTTCCGGGCCCTCACATTGCCAAAAGACGGCAATATGGTGGAAA |
| | ATAACATATAGACAAACGCACACCGGCCTTATTCCAAGCGGCTTC |
| | GGCCAGTAACGTTAGGGGGGGGGGAGGGAGAGGGGCACCGACTCG |
| | GTGCCACTTTTTCAAGTTGATAACGGACTAGCCTTATTTAAACTT |
| | GCTATGCTGTTTCCAGCATAGCTCTTAAATGTTCTCGAACATGGC |
| | ATTGGGAACACGGTGTTTCGTCCTTTCCACAAGATATATAAAGCC |
| | AAGAAATCGAAATACTTTCAAGTTACGGTAAGCATATGATAGTCC |
| | ATTTTAAAACATAATTTTAAAACTGCAAACTACCCAAGAAATTAT |
| | TACTTTCTACGTCACGTATTTTGTACTAATATCTTTGTGTTTACA |
| | GTCAAATTAATTCTAATTATCTCTCTAACAGCCTTGTATCGTATA |
| | TGCAAATATGAAGGAATCATGGGAAATAGGCCCTCTTCCTGCCCG |
| | ACCTCGCGGCCGCGAAGGATCTGCGATCGCTCCGGTGCCCGTCAG |
| | TGGGCAGAGCGCACATCGCCCACAGTCCCCGAGAAGTTGGGGGGA |
| | GGGGTCGGCAATTGAACGGGTGCCTAGAGAAGGTGGCGCGGGGTA |
| | AACTGGGAAAGTGATGTCGTGTACTGGCTCCGCCTTTTTCCCGAG |
| | GGTGGGGGAGAACCGTATATAAGTGCAGTAGTCGCCGTGAACGTT |
| | CTTTTTCGCAACGGGTTTGCCGCCAGAACACAGCTGAAGCTTCGA |
| | GGGGCTCGCATCTCTCCTTCACGCGCCCGCCGCCCTACCTGAGGC |
| | CGCCATCCACGCCGGTTGAGTCGCGTTCTGCCGCCTCCCGCCTGT |
| | GGTGCCTCCTGAACTGCGTCCGCCGTCTAGGTAAGTTTAAAGCTC |
| | AGGTCGAGACCGGGCCTTTGTCCGGCGCTCCCTTGGAGCCTACCT |
| | AGACTCAGCCGGCTCTCCACGCTTTGCCTGACCCTGCTTGCTCAA |
| | CTCTACGTCTTTGTTTCGTTTTCTGTTCTGCGCCGTTACAGATCC |
| | AAGCTGTGACCGGCGCCTACGCTAGATGACCGAGTACAAGCCCAC |
| | GGTGCGCCTCGCCACCCGCGACGACGTCCCCAGGGCCGTACGCAC |
| | CCTCGCCGCCGCGTTCGCCGACTACCCCGCCACGCGCCACACCGT |
| | CGATCCGGACCGCCACATCGAGCGGGTCACCGAGCTGCAAGAACT |
| | CTTCCTCACGCGCGTCGGGCTCGACATCGGCAAGGTGTGGGTCGC |
| | GGACGACGGCGCCGCGGTGGCGGTCTGGACCACGCCGGAGAGCGT |
| | CGAAGCGGGGGCGGTGTTCGCCGAGATCGGCCCGCGCATGGCCGA |
| | GTTGAGCGGTTCCCGGCTGGCCGCGCAGCAACAGATGGAAGGCCT |
| | CCTGGCGCCGCACCGGCCCAAGGAGCCCGCGTGGTTCCTGGCCAC |
| | CGTCGGCGTCTCGCCCGACCACCAGGGCAAGGGTCTGGGCAGCGC |
| | CGTCGTGCTCCCCGGAGTGGAGGCGGCCGAGCGCGCCGGGGTGCC |
| | CGCCTTCCTGGAGACCTCCGCGCCCCGCAACCTCCCCTTCTACGA |
| | GCGGCTCGGCTTCACCGTCACCGCCGACGTCGAGGTGCCCGAAGG |
| | ACCGCGCACCTGGTGCATGACCCGCAAGCCCGGTGCCGGAAGCGG |
| | AGCTACTAACTTCAGCCTGCTGAAGCAGGCTGGAGACGTGGAGGA |
| | GAACCCTGGACCTATGTCTAGACTGGACAAGAGCAAAGTCATAAA |
| | CGGCGCTCTGGAATTACTCAATGGAGTCGGTATCGAAGGCCTGAC |
| | GACAAGGAAACTCGCTCAAAAGCTGGGAGTTGAGCAGCCTACCCT |
| | GTACTGGCACGTGAAGAACAAGCGGGCCCTGCTCGATGCCCTGCC |
| | AATCGAGATGCTGGACAGGCATCATACCCACTTCTGCCCCCTGGA |
| | AGGCGAGTCATGGCAAGACTTTCTGCGGAACAACGCCAAGTCATT |
| | CCGCTGTGCTCTCCTCTCACATCGCGACGGGGCTAAAGTGCATCT |
| | CGGCACCCGCCCAACAGAGAAACAGTACGAAACCCTGGAAAATCA |
| | GCTCGCGTTCCTGTGTCAGCAAGGCTTCTCCCTGGAGAACGCACT |
| | GTACGCTCTGTCCGCCGTGGGCCACTTTACACTGGGCTGCGTATT |
| | GGAGGAACAGGAGCATCAAGTAGCAAAAGAGGAAAGAGAGACACC |
| | TACCACCGATTCTATGCCCCCACTTCTGAGACAAGCAATTGAGCT |
| | GTTCGACCGGCAGGGAGCCGAACCTGCCTTCCTTTTCGGCCTGGA |
| | ACTAATCATATGTGGCCTGGAGAAACAGCTAAAGTGCGAAAGCGG |
| | CGGGCCGGCCGACGCCCTTGACGATTTTGACTTAGACATGCTCCC |
| | AGCCGATGCCCTTGACGACTTTGACCTTGATATGCTGCCTGCTGA |
| | CGCTCTTGACGATTTTGACCTTGACATGCTCCCCGGGTAACTAAG |
| | TAACCCTCTCCCTCCCCCCCCCCTAACGTTACTGGCCGAAGCCGC |
| | TTGGAATAAGGCCGGTGTGCGTTTGTCTATATGTTATTTTCCACC |
| | ATATTGCCGTCTTTTGGCAATGTGAGGGCCCGGAAACCTGGCCCT |
| | GTCTTCTTGACGAGCATTCCTAGGGGTCTTTCCCCTCTCGCCAAA |
| | GGAATGCAAGGTCTGTTGAATGTCGTGAAGGAAGCAGTTCCTCTG |
| | GAAGCTTCTTGAAGACAAACAACGTCTGTAGCGACCCTTTGCAGG |
| | CAGCGGAACCCCCCACCTGGCGACAGGTGCCTCTGCGGCCAAAAG |
| | CCACGTGTATAAGATACACCTGCAAAGGCGGCACAACCCCAGTGC |
| | CACGTTGTGAGTTGGATAGTTGTGGAAAGAGTCAAATGGCTCTCC |
| | TCAAGCGTATTCAACAAGGGGCTGAAGGATGCCCAGAAGGTACCC |
| | CATTGTATGGGATCTGATCTGGGGCCTCGGTGCACATGCTTTACA |
| | TGTGTTTAGTCGAGGTTAAAAAAACGTCTAGGCCCCCCGAACCAC |
| | GGGGACGTGGTTTTCCTTTGAAAAACACGATGATAATATGGCCAC |
| | AACCATGGTCTCTAAAGGAGGTTCGTCCGACGACGAAGCAACAGC |
| | GGACTCGCAGCACGCCGCACCTCCTAAGAAGAAAAGGAAGGTAGG |
| | GGATCCCCGGGTACCGGTCGCCACCATGGCCATCATCAAGGAGTT |
| | CATGCGCTTCAAGGTGCACATGGAGGGCTCCGTGAACGGCCACGA |
| | GTTCGAGATCGAGGGCGAGGGCGAGGGCCGCCCCTACGAGGGCAC |
| | CCAGACCGCCAAGCTGAAGGTGACCAAGGGTGGCCCCCTGCCCTT |
| | CGCCTGGGACATCCTGTCCCCTCAGTTCATGTACGGCTCCAAGGC |
| | CTACGTGAAGCACCCCGCCGACATCCCCGACTACTTGAAGCTGTC |
| | CTTCCCCGAGGGCTTCAAGTGGGAGCGCGTGATGAACTTCGAGGA |
| | CGGCGGCGTGGTGACCGTGACCCAGGACTCCTCCCTGCAGGACGG |
| | CGAGTTCATCTACAAGGTGAAGCTGCGCGGCACCAACTTCCCCTC |
| | CGACGGCCCCGTAATGCAGAAGAAGACCATGGGCTGGGAGGCCTC |
| | CTCCGAGCGGATGTACCCCGAGGACGGCGCCCTGAAGGGCGAGAT |
| | CAAGCAGAGGCTGAAGCTGAAGGACGGCGGCCACTACGACGCTGA |
| | GGTCAAGACCACCTACAAGGCCAAGAAGCCCGTGCAGCTGCCCGG |
| | CGCCTACAACGTCAACATCAAGTTGGACATCACCTCCCACAACGA |
| | GGACTACACCATCGTGGAACAGTACGAACGCGCCGAGGGCCGCCA |
| | CTCCACCGGCGGCATGGACGAGCTGTACAAGTAAGTCGACAATCA |
| | ACCTCTGGATTACAAAATTTGTGAAAGATTGACTGGTATTCTTAA |
| | CTATGTTGCTCCTTTTACGCTATGTGGATACGCTGCTTTAATGCC |
| | TTTGTATCATGCGTTAACTAAACTTGTTTATTGCAGCTTATAATG |
| | GTTACAAATAAAGCAATAGCATCACAAATTTCACAAATAAAGCAT |
| | TTTTTTCACTGCATTCTAGTTGTGGTTTGTCCAAACTCATCAATG |
| | TATCTTATCATGTCTGGAATTGACTCAAATGATGTCAATTAGTCT |
| | ATCAGAAGCTCATCTGGTCTCCCTTCCGGGGGACAAGACATCCCT |
| | GTTTAATATTTAAACAGCAGTGTTCCCAAACTGGGTTCTTATATC |
| | CCTTGCTCTGGTCAACCAGGTTGCAGGGTTTCCTGTCCTCACAGG |
| | AACGAAGTCCCTAAAGAAACAGTGGCAGCCAGGTTTAGCCCCGGA |
| | ATTGACTGGATTCCTTTTTTAGGGCCCATTGGTATGGCTTTTTCC |
| | CCGTATCCCCCCAGGTGTCTGCAGGCTCAAAGAGCAGCGAGAAGC |
| | GTTCAGAGGAAAGCGATCCCGTGCCACCTTCCCCGTGCCCGGGCT |
| | GTCCCCGCACGCTGCCGGCTCGGGGATGCGGGGGGAGCGCCGGAC |
| | CGGAGCGGAGCCCCGGGCGGCTCGCTGCTGCCCCCTAGCGGGGGA |
| | GGGACGTAATTACATCCCTGGGGGCTTTGGGGGGGGGCTGTCCCT |
| | GATATCTATAACAAGAAAATATATATATAATAAGTTATCACGTAA |
| | GTAGAACATGAAATAACAATATAATTATCGTATGAGTTAAATCTT |
| | AAAAGTCACGTAAAAGATAATCATGCGTCATTTTGACTCACGCGG |
| | TCGTTATAGTTCAAAATCAGTGACACTTACCGCATTGACAAGCAC |
| | GCCTCACGGGAGCTCCAAGCGGCGACTGAGATGTCCTAAATGCAC |
| | AGCGACGGATTCGCGCTATTTAGAAAGAGAGAGCAATATTTCAAG |
| | AATGCATGCGTCAATTTTACGCAGACTATCTTTCTAGGGTTAATC |
| | TAGCTGCATCAGGATCATATCGTCGGGTCTTTTTTCCGGCTCAGT |
| | CATCGCCCAAGCTGGCGCTATCTGGGCATCGGGGAGGAAGAAGCC |
| | CGTGCCTTTTCCCGCGAGGTTGAAGCGGCATGGAAAGAGTTTGCC |
| | GAGGATGACTGCTGCTGCATTGACGTTGAGCGAAAACGCACGTTT |
| | ACCATGATGATTCGGGAAGGTGTGGCCATGCACGCCTTTAACGGT |
| | GAACTGTTCGTTCAGGCCACCTGGGATACCAGTTCGTCGCGGCTT |
| | TTCCGGACACAGTTCCGGATGGTCAGCCCGAAGCGCATCAGCAAC |
| | CCGAACAATACCGGCGACAGCCGGAACTGCCGTGCCGGTGTGCAG |
| | ATTAATGACAGCGGTGCGGCGCTGGGATATTACGTCAGCGAGGAC |
| | GGGTATCCTGGCTGGATGCCGCAGAAATGGACATGGATACCCCGT |
| | GAGTTACCCGGCGGGCGCGCTTGGCGTAATCATGGTCATAGCTGT |
| | TTCCTGTGTGAAATTGTTATCCGCTCACAATTCCACACAACATAC |
| | GAGCCGGAAGCATAAAGTGTAAAGCCTGGGGTGCCTAATGAGTGA |
| | GCTAACTCACATTAATTGCGTTGCGCTCACTGCCCGCTTTCCAGT |
| | CGGGAAACCTGTCGTGCCAGCTGCATTAATGAATCGGCCAACGCG |
| | CGGGGAGAGGCGGTTTGCGTATTGGGCGCTCTTCCGCTTCCTCGC |
| | TCACTGACTCGCTGCGCTCGGTCGTTCGGCTGCGGCGAGCGGTAT |
| | CAGCTCACTCAAAGGCGGTAATACGGTTATCCACAGAATCAGGGG |
| | ATAACGCAGGAAAGAACATGTGAGCAAAAGGCCAGCAAAAGGCCA |
| | GGAACCGTAAAAAGGCCGCGTTGCTGGCGTTTTTCCATAGGCTCC |
| | GCCCCCCTGACGAGCATCACAAAAATCGACGCTCAAGTCAGAGGT |
| | GGCGAAACCCGACAGGACTATAAAGATACCAGGCGTTTCCCCCTG |
| | GAAGCTCCCTCGTGCGCTCTCCTGTTCCGACCCTGCCGCTTACCG |
| | GATACCTGTCCGCCTTTCTCCCTTCGGGAAGCGTGGCGCTTTCTC |
| | ATAGCTCACGCTGTAGGTATCTCAGTTCGGTGTAGGTCGTTCGCT |
| | CCAAGCTGGGCTGTGTGCACGAACCCCCCGTTCAGCCCGACCGCT |
| | GCGCCTTATCCGGTAACTATCGTCTTGAGTCCAACCCGGTAAGAC |
| | ACGACTTATCGCCACTGGCAGCAGCCACTGGTAACAGGATTAGCA |
| | GAGCGAGGTATGTAGGCGGTGCTACAGAGTTCTTGAAGTGGTGGC |
| | CTAACTACGGCTACACTAGAAGGACAGTATTTGGTATCTGCGCTC |
| | TGCTGAAGCCAGTTACCTTCGGAAAAAGAGTTGGTAGCTCTTGAT |
| | CCGGCAAACAAACCACCGCTGGTAGCGGTGGTTTTTTTGTTTGCA |
| | AGCAGCAGATTACGCGCAGAAAAAAAGGATCTCAAGAAGATCCTT |
| | TGATCTTTTCTACGGGGTCTGACGCTCAGTGGAACGAAAACTCAC |
| | GTTAAGGGATTTTGGTCATGAGATTATCAAAAAGGATCTTCACCT |
| | AGATCCTTTTAAATTAAAAATGAAGTTTTAAATCAATCTAAAGTA |
| | TATATGAGTAAACTTGGTCTGACAGTTACCAATGCTTAATCAGTG |
| | AGGCACCTATCTCAGCGATCTGTCTATTTCGTTCATCCATAGTTG |
| | CCTGACTCCCCGTCGTGTAGATAACTACGATACGGGAGGGCTTAC |
| | CATCTGGCCCCAGTGCTGCAATGATACCGCGAGACCCACGCTCAC |
| | CGGCTCCAGATTTATCAGCAATAAACCAGCCAGCCGGAAGGGCCG |
| | AGCGCAGAAGTGGTCCTGCAACTTTATCCGCCTCCATCCAGTCTA |
| | TTAATTGTTGCCGGGAAGCTAGAGTAAGTAGTTCGCCAGTTAATA |
| | GTTTGCGCAACGTTGTTGCCATTGCTACAGGCATCGTGGTGTCAC |
| | GCTCGTCGTTTGGTATGGCTTCATTCAGCTCCGGTTCCCAACGAT |
| | CAAGGCGAGTTACATGATCCCCCATGTTGTGCAAAAAAGCGGTTA |
| | GCTCCTTCGGTCCTCCGATCGTTGTCAGAAGTAAGTTGGCCGCAG |
| | TGTTATCACTCATGGTTATGGCAGCACTGCATAATTCTCTTACTG |
| | TCATGCCATCCGTAAGATGCTTTTCTGTGACTGGTGAGTACTCAA |
| | CCAAGTCATTCTGAGAATAGTGTATGCGGCGACCGAGTTGCTCTT |
| | GCCCGGCGTCAATACGGGATAATACCGCGCCACATAGCAGAACTT |
| | TAAAAGTGCTCATCATTGGAAAACGTTCTTCGGGGCGAAAACTCT |
| | CAAGGATCTTACCGCTGTTGAGATCCAGTTCGATGTAACCCACTC |
| | GTGCACCCAACTGATCTTCAGCATCTTTTACTTTCACCAGCGTTT |
| | CTGGGTGAGCAAAAACAGGAAGGCAAAATGCCGCAAAAAAGGGAA |
| | TAAGGGCGACACGGAAATGTTGAATACTCAT (SEQ ID NO: |
| | 93) |

### Example 1

### EIF4E Fusion Protein

[0453] This example is based on the 5′ Cap binding biology of EIF4E protein, which enhances translation of a target mRNA. The EIF4E protein in this example comprises mutated amino acid residues known to be regulated by cellular kinases, to make its regulation constitutive. Experiments were performed with nuclease dead Cas9 (dCas9), with protein effectors fused to the C-terminus. Any messenger RNA of interest can be targeted with this system, given the selection of an appropriate mRNA targeting spacer sequence, which is specific to each CRISPR-Cas system.

[0454] An exemplary system is composed of a nuclease-dead Cas9 (dCas9) protein fused to a modified EIF4E (FIG. 1), which can enhance translation. These dCas9 fusion proteins bind a single guide RNA (sgRNA) driven by a U6 polymerase III promoter, and may co-bind an antisense synthetic oligonucleotide composed alternating 2′OMe RNA and DNA bases (PAMmer). Together, these components form an RCas9-RNA recognition complex that binds messenger RNA.

[0455] Without being bound by theory, a PAMmer likely increases binding affinity of dCas9 to RNA in vivo as well as in vitro, but likely it is not absolutely required for RNA targeting. Preliminary experiments were performed in the absence of a PAMmer.

[0456] A schematic of the anticipated mechanism is shown in FIG. 1. Without being bound by theory, dCas9-EIF4E targets the 3′UTR of a representative target transcript mRNA. Modified EIF4E facilitates transcript circularization and the recruitment of EIF4G and ribosomal pre-initiation complexes.

[0457] DNA constructs were prepared as shown in FIG. 3A and FIG. 3B. Cas9-EIF4E expression level was correlated to a co-expressed CFP fluorophore on the Effector plasmid. YFP and RFP are co-expressed from different promoters on the Reporter. However, only YFP messenger RNA carries a target site (LUC target site) that is complementary to the spacer of the single guide RNA (sgRNA).

[0458] Results of the experiments are shown in FIG. 3C: (i) Heatmap showing how the fold change in YFP/RFP ratio relate to Reporter (x-axis) and Effector (y-axis) DNA construct levels. Datapoints used for the heatmap represent the average fluorescence of single cells that fall within defined bins. (ii) Same data as presented in (i), but with YFP/RFP ratio plotted as third variable (z-axis). (iii) Residuals for datapoints used to generate heatmap.

### Example 2

### EIF4E-BP1 Fusion Protein

[0459] This technology is based on the 5′ Cap binding biology of EIF4E-BP1, which represses translation. To adapt this protein to the specific application described herein, amino acid residues known to be regulated by cellular kinases were mutated, to make its regulation constitutive. Experiments were performed with nuclease dead Cas9 (dCas9), with protein effectors fused to the C-terminus. Any messenger RNA of interest can be targeted, given the selection of an appropriate gRNA spacer sequence, which is specific to each CRISPR-Cas system.

[0460] An exemplary system is composed of a nuclease-dead Cas9 (dCas9) protein fused to a modified EIF4E-BP1 (FIG. 2), which can enhance or repress translation, respectively. These dCas9 fusion proteins bind a single guide RNA (sgRNA) driven by a U6 polymerase III promoter, and may co-bind an antisense synthetic oligonucleotide composed alternating 2′OMe RNA and DNA bases (PAMmer). Together, these components form an RCas9-RNA recognition complex that binds messenger RNA.

[0461] FIG. 2 depicts the anticipated mechanism of this system. Without being bound by theory, dCas9 fused to a modified EIF4E-BP1. The schematic shows dCas9-EIF4E-BP1 targeting the 3′ UTR of a representative target transcript. Modified EIF4E-BP1 facilitates transcript mRNA circularization, and prevents the disengagement of EIF4E-BP1 from EIF4E. Constitutive binding prevents the recruitment of EIF4G and ribosomal pre-initiation complexes.

[0462] DNA constructs for Effector and Reporter constructs used for characterization studies were prepared as shown in FIG. 4A and 4B. Cas9-EIF4E-BP1 expression level was correlated to a co-expressed CFP fluorophore on the Effector. YFP and RFP were coexpressed from different promoters on the Reporter. However, only YFP messenger RNA carries a target site (LUC target site) that is complementary to the spacer of the single guide RNA (sgRNA).

[0463] Results of these experiments are shown in FIG. 4C: (i) Heatmap showing how the fold change in YFP/RFP ratio relate to Reporter (x-axis) and Effector (y-axis) DNA construct levels. Datapoints used for the heatmap represent the average fluorescence of single cells that fall within defined bins. (ii) Same data as presented in (i), but with YFP/RFP ratio plotted as third variable (z-axis). (iii) Residuals for datapoints used to generate heatmap.

### Example 3

### UBAP2L Fusion Protein

[0464] This example is based on a screen that implicated the ubiquitin-associated protein 2-like (UBAP2L) as a previously unknown RNA binding protein (RBP) that enhances translation. Experiments were performed with a RNA-targeting Cas9 (rCas9) with UBAP2L fused to the C-terminus. Any messenger RNA of interest can be targeted with this system, given the selection of an appropriate mRNA targeting spacer sequence, which s specific to each CRISPR-Cas system.

[0465] An exemplary system is composed of a RNA-targeting Cas9 (rCas9) fused to UBAP2L, which can enhance translation (FIG. 8). HEK293T cells lines expressing a Cas9-UBAP2L fusion or Cas9 only were derived via transposase-mediated piggyback genomic integration of a plasmid construct with an rCas9-UBAP2L or rCas9 expression cassette. A second construct was then transfected containing a reporter that stably expresses RFP transcripts not regulated by Cas9, a guide RNA, and tetracycline-inducible YFP transcripts with the guide RNA target sequences. Seven different guide RNAs were designed, targeting different locations within the YFP transcripts, and a non-targeting guide RNA. Post-transcriptional regulation was measured as changes in the normalized YFP/RFP fluorescence ratio using analytical flow cytometry. Due to the random nature of piggyback-mediated integration in terms of construct integration sites and numbers, regulation for various rCas9 construct levels (CFP) and reporter construct levels (RFP) were quantified across thousands of data points (cells). The extent of the effect of UBAP2L on YFP reporter expression was observed to be dependent on UBAP2L directed targeting to sites within the coding region (FIG. 9).

### Example 4

### Fusion RNAs

[0466] This example relates to a fusion RNA platform that is capable of enhancing the translation of a specific messenger RNA in cells. This technology depends on the ability of CRISPR-Cas systems to bind target messenger RNA via a single stranded guide, to which a ribonucleic acid sequence is fused that recruits translational pre-initiation complexes to the bound messenger RNA. This technology can thus initiate translation in trans.

[0467] This technology is built on the RNA targeting abilities of CRISPR-Cas systems, which uses a single stranded guide RNA to provide a simple and rapidly programmable system for regulating messenger RNA molecules in cells. CRISPR-Cas systems also have neutral effects on messenger RNA stability, which makes any measured change to gene expression a function of the nucleic acid effector fused to the guide RNA. Due to its highly encodable nature, as well as its adaptability to multiple CRISPR/Cas systems, the exemplary fusion RNA platform promises high utility and versatility when compared to other methods.

[0468] A fusion RNA was designed comprising a single stranded RNA guide (sgRNA) or a single stranded CRISPR RNA (crRNA) fused to a ribonucleic acid sequence based on Type I or Type II viral internal ribosome entry sequences (IRES). These modified sgRNA and crRNA are bound by nuclease-dead Cas9 (dCas9) protein and nuclease-dead Cas13b (dCas13b), respectively. Messenger RNA target specificity is conferred by a suitable spacer sequence, which is present at the 5′ end of sgRNA and crRNA. When the fusion RNA is expressed in cells, it binds to a target messenger RNA specifically. Fused ribonucleic acid sequence effectors then recruit pre-initiation complexes to the bound messenger RNA to promote protein translation as shown in FIG. 5.

[0469] Exemplary characterization was carried out using ribonucleic acid sequences derived from Type II Encephalomyocarditis Virus (EMCV-IRES). However, this technology is not limited to a particular type of IRES and may comprise any ribonucleic acid sequence that comprises the functional abilities and/or structural properties of an IRES.

[0470] For fusion RNA systems based on dCas9, an antisense synthetic oligonucleotide composed of alternating 2′OMe RNA and DNA bases (PAMmer) may also be provided. To simplify the delivery strategy, however, preliminary experiments involving dCas9 were performed without PAMmer. Without being bound by theory, it is thought that a PAMmer likely increases binding affinity of dCas9 to RNA in vivo as well as in vitro, but is has been found that it is not absolutely required for RNA targeting. Preliminary experiments were performed in the absence of a PAMmer. PAMmer is not required for systems based on dCas13b.

[0471] Fusion RNA systems were prepared with sgRNA or crRNA fused to PV-IRES, FMDV-IRES or EMCV-IRES. In this example, no specific modification was made to dCas9 or dCas13b except for the inclusion of a nuclear export sequence.

[0472] To quantify regulation by the fusion RNAs, a dual-fluorescence assay based on yellow fluorescent protein (YFP) and red fluorescent protein (RFP) expression was developed (FIG. 6A and FIG. 6B). Spacer sequences were designed to target the fusion RNA to YFP mRNA and regulate YFP expression (FIG. 6C). In contrast, RFP mRNA remains unbound, thus allowing RFP fluorescence and protein levels to serve as a transfection control. An HA-tag was appended to the C-terminus of YFP, which can be used to assay regulation of different YFP translation reading frames as a result of initiation at alternative start codons. Different YFP isoforms can be distinguished via Western blot. Changes in overall post-transcriptional regulation can also be represented as changes in the YFP to RFP fluorescence ratio.

[0473] As shown in FIGS. 7A-7B, regulation by dCas9 and dCas13b fusion RNAs that use EMCV-IRES successfully mediate an enhancement in protein translation (FIG. 7A and FIG. 7B).

### REFERENCES

[0474] All references disclosed herein and throughout the disclosure are incorporated by reference in their entirety.
[0475] 1. Cooke et al. 2011. “Targeted translational regulation using the PUF protein family scaffold” PNAS 108(38): 15870-15875.
[0476] 2. Cao et al. 2015. “A universal strategy for regulating mRNA translation in prokaryotic and eukaryotic cells” NARS 43(8): 4353-4362.
[0477] 3. WO/2015/089277
[0478] 4. WO/2016/183402

1. A composition comprising one or more polynucleotides encoding:
(i) a guide nucleotide sequence-programmable RNA binding protein; and
(ii) a translation modifier protein.

2. The composition of claim 1, wherein the guide nucleotide sequence-programmable RNA binding protein comprises at least one of Cas9, modified Cas9, Cas13a, Cas13b, CasRX/Cas13d, CasM and a biological equivalent of each thereof.

3. The composition of claim 2, wherein the guide nucleotide sequence-programmable RNA binding protein comprises at least one of Steptococcus pyogenes Cas9 (spCas9), Staphylococcus aureus Cas9 (saCas9), Francisella novicida Cas9 (FnCas9), Neisseria meningitidis Cas9 (nmCas9), Streptococcus thermophilus 1 Cas9 (St1Cas9), Streptococcus thermophilus 3 Cas9 (St3Cas9), and Brevibacillus laterosporus Cas9 (BlatCas9).

4. The composition of claim 2, wherein the guide nucleotide sequence-programmable RNA binding protein is nuclease inactive.

5. The composition of claim 1, wherein the translation modifier protein is at least one of eukaryotic translation initiation factor 4E (EIF4E) (SEQ ID NO: 52-59), eukaryotic translation initiation factor 4E-binding protein (EIF4E-BP1) (SEQ ID NO: 61-62), ubiquitin-associated protein 2-like (UBAP2L) (SEQ ID NO: 64-71), and a biological equivalent of each thereof.

6. The composition of claim 5, wherein the translation modifier protein is encoded by a polynucleotide having a sequence comprising all or part of at least one of SEQ ID NO: 52-55, SEQ ID NO: 61, SEQ ID NO: 64-67, SEQ ID NO: 94-193, SEQ ID NO: 285, SEQ ID NO: 320-348, and a biological equivalent of each thereof.

7. The composition of claim 5, wherein the translation modifier protein has an amino acid sequence comprising all or part of at least one of SEQ ID NO: 56-59, SEQ ID NO: 62, SEQ ID NO: 68-71 and a biological equivalent of each thereof.

8. The composition of claim 1, further comprising a linker.

9. The composition of claim 8, wherein the linker is a peptide linker.

10. (canceled)

11. The composition of claim 8, wherein the linker is a non-peptide linker.

12. (canceled)

13. The composition of claim 1, wherein the guide nucleotide sequence-programmable RNA binding protein is bound to a guide RNA (gRNA), a crisprRNA (crRNA), or a trans-activating crRNA (tracrRNA).

14. The composition of claim 1, wherein one or more kinase phosphorylation domains of the translation modifier protein is mutated.

15. The composition of claim 1, further comprising a vector.

16. The vector of claim 15, wherein the vector is an adenoviral vector, an adeno-associated viral vector, or a lentiviral vector.

17. (canceled)

18. (canceled)

19. (canceled)

20. (canceled)

21. A fusion protein comprising:
(i) a guide nucleotide sequence-programmable RNA binding protein; and
(ii) a translation modifier protein.

22. A system for post-transcriptional gene regulation, the system comprising:
(i) a fusion protein according to claim 21; and
(ii) a gRNA; or
(iii) a crRNA and a tracrRNA;
wherein the gRNA or the crRNA comprises a sequence complementary to a target mRNA.

23. (canceled)

24. A fusion RNA comprising:
(i) a guide nucleotide sequence-programmable RNA; and
(ii) one or more internal ribosome entry sites (IRES).

25. The fusion RNA of claim 24, wherein the guide nucleotide sequence-programmable RNA is a guide RNA (gRNA) or a crisprRNA (crRNA).

26. The fusion RNA of claim 24, wherein the guide nucleotide sequence-programmable RNA is derived from a guide RNA scaffold from Steptococcus pyogenes, Staphylococcus aureus, Francisella novicida, Neisseria meningitidis, Streptococcus thermophilus, or Brevibacillus laterosporus.

27. The fusion RNA of claim 24, wherein the IRES is at least one of a Poliovirus IRES, Rhinovirus IRES, Encephalomyocarditis virus IRES (EMCV-IRES), Picornavirus IRES, Foot-and-mouth disease virus IRES (FMDV-IRES), Aphthovirus IRES, Kaposi's sarcoma-associated herpesvirus IRES (KSHV-IRES), Hepatitis A IRES, Hepatitis C IRES, Classical swine fever virus IRES, Pestivirus IRES, Bovine viral diarrhea virus IRES, Friend murine leukemia IRES, Moloney murine leukemia IRES (MMLV-IRES), Rous sarcoma virus IRES, Human immunodeficiency virus IRES (HIV-IRES), Plautia stali intestine virus IRES, Cripavirus IRES, Cricket paralysis virus IRES, Triatoma virus IRES, Rhopalosiphum padi virus IRES, Marek's disease virus IRES, Fibroblast growth factor (FGF-1 IRES and FGF-2 IRES), Platelet-derived growth factor B (PDGF/c-sis IRES), Vascular endothelial growth factor (VEGF IRES), and an Insulin-like growth factor 2 (IGF-II IRES).

28. (canceled)

The application's sequence listing, which the Patent Office published only in electronic form, follows.

SEQUENCE LISTING (353 sequences)

SEQ ID NO: 1 - protein, 1368 aa, Streptococcus pyogenes [sequence omitted]

SEQ ID NO: 2 - protein, 1053 aa, Staphylococcus aureus
MKRNYILGLDIGITSVGYGIIDYETRDVIDAGVRLFKEANVENNEGRRSKRGARRLKRRRRHRIQRVKKLLFDYNLLTDHSELSGINPYEARVKGLSQKLSEEEFSAALLHLAKRRGVHNVNEVEEDTGNELSTKEQISRNSKALEEKYVAELQLERLKKDGEVRGSINRFKTSDYVKEAKQLLKVQKAYHQLDQSFIDTYIDLLETRRTYYEGPGEGSPFGWKDIKEWYEMLMGHCTYFPEELRSVKYAYNADLYNALNDLNNLVITRDENEKLEYYEKFQIIENVFKQKKKPTLKQIAKEILVNEEDIKGYRVTSTGKPEFTNLKVYHDIKDITARKEIIENAELLDQIAKILTIYQSSEDIQEELTNLNSELTQEEIEQISNLKGYTGTHNLSLKAINLILDELWHTNDNQIAIFNRLKLVPKKVDLSQQKEIPTTLVDDFILSPVVKRSFIQSIKVINAIIKKYGLPNDIIIELAREKNSKDAQKMINEMQKRNRQTNERIEEIIRTTGKENAKYLIEKIKLHDMQEGKCLYSLEAIPLEDLLNNPFNYEVDHIIPRSVSFDNSFNNKVLVKQEENSKKGNRTPFQYLSSSDSKISYETFKKHILNLAKGKGRISKTKKEYLLEERDINRFSVQKDFINRNLVDTRYATRGLMNLLRSYFRVNNLDVKVKSINGGFTSFLRRKWKFKKERNKGYKHHAEDALIIANADFIFKEWKKLDKAKKVMENQMFEEKQAESMPEIETEQEYKEIFITPHQIKHIKDFKDYKYSHRVDKKPNRELINDTLYSTRKDDKGNTLIVNNLNGLYDKDNDKLKKLINKSPEKLLMYHHDPQTYQKLKLIMEQYGDEKNPLYKYYEETGNYLTKYSKKDNGPVIKKIKYYGNKLNAHLDITDDYPNSRNKVVKLSLKPYRFDVYLDNGVYKFVTVKNLDVIKKENYYEVNSKCYEEAKKLKKISNQAEFIASFYNNDLIKINGELYRVIGVNNDLLNRIEVNMIDITYREYLENMNDKRPPRIIKTIASKTQSIKKYSTDILGNLYEVKSKKHPQIIKKG

SEQ ID NO: 3 - protein, 1121 aa, Streptococcus thermophilus
MSDLVLGLDIGIGSVGVGILNKVTGEIIHKNSRIFPAAQAENNLVRRTNRQGRRLARRKKHRRVRLNRLFEESGLITDFTKISINLNPYQLRVKGLTDELSNEELFIALKNMVKHRGISYLDDASDDGNSSVGDYAQIVKENSKQLETKTPGQIQLERYQTYGQLRGDFTVEKDGKKHRLINVFPTSAYRSEALRILQTQQEFNPQITDEFINRYLEILTGKRKYYHGPGNEKSRTDYGRYRTSGETLDNIFGILIGKCTFYPDEFRAAKASYTAQEFNLLNDLNNLTVPTETKKLSKEQKNQIINYVKNEKAMGPAKLFKYIAKLLSCDVADIKGYRIDKSGKAEIHTFEAYRKMKTLETLDIEQMDRETLDKLAYVLTLNTEREGIQEALEHEFADGSFSQKQVDELVQFRKANSSIFGKGWHNFSVKLMMELIPELYETSEEQMTILTRLGKQKTTSSSNKTKYIDEKLLTEEIYNPVVAKSVRQAIKIVNAAIKEYGDFDNIVIEMARETNEDDEKKAIQKIQKANKDEKDAAMLKAANQYNGKAELPHSVFHGHKQLATKIRLWHQQGERCLYTGKTISIHDLINNSNQFEVDHILPLSITFDDSLANKVLVYATANQEKGQRTPYQALDSMDDAWSFRELKAFVRESKTLSNKKKEYLLTEEDISKFDVRKKFIERNLVDTRYASRVVLNALQEHFRAHKIDTKVSVVRGQFTSQLRRHWGIEKTRDTYHHHAVDALIIAASSQLNLWKKQKNTLVSYSEDQLLDIETGELISDDEYKESVFKAPYQHFVDTLKSKEFEDSILFSYQVDSKFNRKISDATIYATRQAKVGKDKADETYVLGKIKDIYTQDGYDAFMKIYKKDKSKFLMYRHDPQTFEKVIEPILENYPNKQINDKGKEVPCNPFLKYKEEHGYIRKYSKKGNGPEIKSLKYYDSKLGNHIDITPKDSNNKVVLQSVSPWRADVYFNKTTGKYEILGLKYADLQFDKGTGTYKISQEKYNDIKKKEGVDSDSEFKFTLYKNDLLLVKDTETKEQQLFRFLSRTMPKQKHYVELKPYDKQKFEGGEALIKVLGNVANSGQCKKGLGKSNISIYKVRTDVLGNQHIIKNEGDKPKLDF

SEQ ID NO: 4 - protein, 1082 aa, Neisseria meningitidis
MAAFKPNPINYILGLDIGIASVGWAMVEIDEDENPICLIDLGVRVFERAEVPKTGDSLAMARRLARSVRRLTRRRAHRLLRARRLLKREGVLQAADFDENGLIKSLPNTPWQLRAAALDRKLTPLEWSAVLLHLIKHRGYLSQRKNEGETADKELGALLKGVADNAHALQTGDFRTPAELALNKFEKESGHIRNQRGDYSHTFSRKDLQAELILLFEKQKEFGNPHVSGGLKEGIETLLMTQRPALSGDAVQKMLGHCTFEPAEPKAAKNTYTAERFIWLTKLNNLRILEQGSERPLTDTERATLMDEPYRKSKLTYAQARKLLGLEDTAFFKGLRYGKDNAEASTLMEMKAYHAISRALEKEGLKDKKSPLNLSPELQDEIGTAFSLFKTDEDITGRLKDRIQPEILEALLKHISFDKFVQISLKALRRIVPLMEQGKRYDEACAEIYGDHYGKKNTEEKIYLPPIPADEIRNPVVLRALSQARKVINGVVRRYGSPARIHIETAREVGKSFKDRKEIEKRQEENRKDREKAAAKFREYFPNFVGEPKSKDILKLRLYEQQHGKCLYSGKEINLGRLNEKGYVEIDHALPFSRTWDDSFNNKVLVLGSENQNKGNQTPYEYFNGKDNSREWQEFKARVETSRFPRSKKQRILLQKFDEDGFKERNLNDTRYVNRFLCQFVADRMRLTGKGKKRVFASNGQITNLLRGFWGLRKVRAENDRHHALDAVVVACSTVAMQQKITRFVRYKEMNAFDGKTIDKETGEVLHQKTHFPQPWEFFAQEVMIRVFGKPDGKPEFEEADTPEKLRTLLAEKLSSRPEAVHEYVTPLFVSRAPNRKMSGQGHMETVKSAKRLDEGVSVLRVPLTQLKLKDLEKMVNREREPKLYEALKARLEAHKDDPAKAFAEPFYKYDKAGNRTQQVKAVRVEQVQKTGVWVRNHNGIADNATMVRVDVFEKGDKYYLVPIYSWQVAKGILPDRAVVQGKDEEDWQLIDDSFNFKFSLHPNDLVEVITKKARMFGYFASCHRGTGNINIRIHDLDHKIGKNGILEGIGVKTALSFQKYQIDELGKEIRPCRLKKRPPVR

SEQ ID NO: 5 - protein, 1037 aa, Parvibaculum lavamentivorans
MERIFGFDIGTTSIGFSVIDYSSTQSAGNIQRLGVRIFPEARDPDGTPLNQQRRQKRMMRRQLRRRRIRRKALNETLHEAGFLPAYGSADWPVVMADEPYELRRRGLEEGLSAYEFGRAIYHLAQHRHFKGRELEESDTPDPDVDDEKEAANERAATLKALKNEQTTLGAWLARRPPSDRKRGIHAHRNVVAEEFERLWEVQSKFHPALKSEEMRARISDTIFAQRPVFWRKNTLGECRFMPGEPLCPKGSWLSQQRRMLEKLNNLAIAGGNARPLDAEERDAILSKLQQQASMSWPGVRSALKALYKQRGEPGAEKSLKFNLELGGESKLLGNALEAKLADMFGPDWPAHPRKQEIRHAVHERLWAADYGETPDKKRVIILSEKDRKAHREAAANSFVADFGITGEQAAQLQALKLPTGWEPYSIPALNLFLAELEKGERFGALVNGPDWEGWRRTNFPHRNQPTGEILDKLPSPASKEERERISQLRNPTVVRTQNELRKVVNNLIGLYGKPDRIRIEVGRDVGKSKREREEIQSGIRRNEKQRKKATEDLIKNGIANPSRDDVEKWILWKEGQERCPYTGDQIGFNALFREGRYEVEHIWPRSRSFDNSPRNKTLCRKDVNIEKGNRMPFEAFGHDEDRWSAIQIRLQGMVSAKGGTGMSPGKVKRFLAKTMPEDFAARQLNDTRYAAKQILAQLKRLWPDMGPEAPVKVEAVTGQVTAQLRKLWTLNNILADDGEKTRADHRHHAIDALTVACTHPGMTNKLSRYWQLRDDPRAEKPALTPPWDTIRADAEKAVSEIVVSHRVRKKVSGPLHKETTYGDTGTDIKTKSGTYRQFVTRKKIESLSKGELDEIRDPRIKEIVAAHVAGRGGDPKKAFPPYPCVSPGGPEIRKVRLTSKQQLNLMAQTGNGYADLGSNHHIAIYRLPDGKADFEIVSLFDASRRLAQRNPIVQRTRADGASFVMSLAAGEAIMIPEGSKKGIWIVQGVWASGQVVLERDTDADHSTTTRPMPNPILKDDAKKVSIDPIGRVRPSND

SEQ ID NO: 6 - protein, 1084 aa, Corynebacter diphtheria
MKYHVGIDVGTFSVGLAAIEVDDAGMPIKTLSLVSHIHDSGLDPDEIKSAVTRLASSGIARRTRRLYRRKRRRLQQLDKFIQRQGWPVIELEDYSDPLYPWKVRAELAASYIADEKERGEKLSVALRHIARHRGWRNPYAKVSSLYLPDGPSDAFKAIREEIKRASGQPVPETATVGQMVTLCELGTLKLRGEGGVLSARLQQSDYAREIQEICRMQEIGQELYRKIIDVVFAAESPKGSASSRVGKDPLQPGKNRALKASDAFQRYRIAALIGNLRVRVDGEKRILSVEEKNLVFDHLVNLTPKKEPEWVTIAEILGIDRGQLIGTATMTDDGERAGARPPTHDTNRSIVNSRIAPLVDWWKTASALEQHAMVKALSNAEVDDFDSPEGAKVQAFFADLDDDVHAKLDSLHLPVGRAAYSEDTLVRLTRRMLSDGVDLYTARLQEFGIEPSWTPPTPRIGEPVGNPAVDRVLKTVSRWLESATKTWGAPERVIIEHVREGFVTEKRAREMDGDMRRRAARNAKLFQEMQEKLNVQGKPSRADLWRYQSVQRQNCQCAYCGSPITFSNSEMDHIVPRAGQGSTNTRENLVAVCHRCNQSKGNTPFAIWAKNTSIEGVSVKEAVERTRHWVTDTGMRSTDFKKFTKAVVERFQRATMDEEIDARSMESVAWMANELRSRVAQHFASHGTTVRVYRGSLTAEARRASGISGKLKFFDGVGKSRLDRRHHAIDAAVIAFTSDYVAETLAVRSNLKQSQAHRQEAPQWREFTGKDAEHRAAWRVWCQKMEKLSALLTEDLRDDRVVVMSNVRLRLGNGSAHKETIGKLSKVKLSSQLSVSDIDKASSEALWCALTREPGFDPKEGLPANPERHIRVNGTHVYAGDNIGLFPVSAGSIALRGGYAELGSSFHHARVYKITSGKKPAFAMLRVYTIDLLPYRNQDLFSVELKPQTMSMRQAEKKLRDALATGNAEYLGWLVVDDELVVDTSKIATDQVKAVEAELGTIRRWRVDGFFSPSKLRLRPLQMSKEGIKKESAPELSKIIDRPGWLPAVNKLFSDGNVTVVRRDSLGRVRLESTAHLPVTWKVQ

SEQ ID NO: 7 - protein, 1130 aa, Streptococcus pasteurianus
MTNGKILGLDIGIASVGVGIIEAKTGKVVHANSRLFSAANAENNAERRGFRGSRRLNRRKKHRVKRVRDLFEKYGIVTDFRNLNLNPYELRVKGLTEQLKNEELFAALRTISKRRGISYLDDAEDDSTGSTDYAKSIDENRRLLKNKTPGQIQLERLEKYGQLRGNFTVYDENGEAHRLINVFSTSDYEKEARKILETQADYNKKITAEFIDDYVEILTQKRKYYHGPGNEKSRTDYGRFRTDGTTLENIFGILIGKCNFYPDEYRASKASYTAQEYNFLNDLNNLKVSTETGKLSTEQKESLVEFAKNTATLGPAKLLKEIAKILDCKVDEIKGYREDDKGKPDLHTFEPYRKLKFNLESINIDDLSREVIDKLADILTLNTEREGIEDAIKRNLPNQFTEEQISEIIKVRKSQSTAFNKGWHSFSAKLMNELIPELYATSDEQMTILTRLEKFKVNKKSSKNTKTIDEKEVTDEIYNPVVAKSVRQTIKIINAAVKKYGDFDKIVIEMPRDKNADDEKKFIDKRNKENKKEKDDALKRAAYLYNSSDKLPDEVFHGNKQLETKIRLWYQQGERCLYSGKPISIQELVHNSNNFEIDHILPLSLSFDDSLANKVLVYAWTNQEKGQKTPYQVIDSMDAAWSFREMKDYVLKQKGLGKKKRDYLLTTENIDKIEVKKKFIERNLVDTRYASRVVLNSLQSALRELGKDTKVSVVRGQFTSQLRRKWKIDKSRETYHHHAVDALIIAASSQLKLWEKQDNPMFVDYGKNQVVDKQTGEILSVSDDEYKELVFQPPYQGFVNTISSKGFEDEILFSYQVDSKYNRKVSDATIYSTRKAKIGKDKKEETYVLGKIKDIYSQNGFDTFIKKYNKDKTQFLMYQKDSLTWENVIEVILRDYPTTKKSEDGKNDVKCNPFEEYRRENGLICKYSKKGKGTPIKSLKYYDKKLGNCIDITPEESRNKVILQSINPWRADVYFNPETLKYELMGLKYSDLSFEKGTGNYHISQEKYDAIKEKEGIGKKSEFKFTLYRNDLILIKDIASGEQEIYRFLSRTMPNVNHYVELKPYDKEKFDNVQELVEALGEADKVGRCIKGLNKPNISIYKVRTDVLGNKYFVKKKGDKPKLDFKNNKK

SEQ ID NO: 8 - protein, 1082 aa, Neisseria cinerea
MAAFKPNPMNYILGLDIGIASVGWAIVEIDEEENPIRLIDLGVRVFERAEVPKTGDSLAAARRLARSVRRLTRRRAHRLLRARRLLKREGVLQAADFDENGLIKSLPNTPWQLRAAALDRKLTPLEWSAVLLHLIKHRGYLSQRKNEGETADKELGALLKGVADNTHALQTGDFRTPAELALNKFEKESGHIRNQRGDYSHTFNRKDLQAELNLLFEKQKEFGNPHVSDGLKEGIETLLMTQRPALSGDAVQKMLGHCTFEPTEPKAAKNTYTAERFVWLTKLNNLRILEQGSERPLTDTERATLMDEPYRKSKLTYAQARKLLDLDDTAFFKGLRYGKDNAEASTLMEMKAYHAISRALEKEGLKDKKSPLNLSPELQDEIGTAFSLFKTDEDITGRLKDRVQPEILEALLKHISFDKFVQISLKALRRIVPLMEQGNRYDEACTEIYGDHYGKKNTEEKIYLPPIPADEIRNPVVLRALSQARKVINGVVRRYGSPARIHIETAREVGKSFKDRKEIEKRQEENRKDREKSAAKFREYFPNFVGEPKSKDILKLRLYEQQHGKCLYSGKEINLGRLNEKGYVEIDHALPFSRTWDDSFNNKVLALGSENQNKGNQTPYEYFNGKDNSREWQEFKARVETSRFPRSKKQRILLQKFDEDGFKERNLNDTRYINRFLCQFVADHMLLTGKGKRRVFASNGQITNLLRGFWGLRKVRAENDRHHALDAVVVACSTIAMQQKITRFVRYKEMNAFDGKTIDKETGEVLHQKAHFPQPWEFFAQEVMIRVFGKPDGKPEFEEADTPEKLRTLLAEKLSSRPEAVHKYVTPLFISRAPNRKMSGQGHMETVKSAKRLDEGISVLRVPLTQLKLKDLEKMVNREREPKLYEALKARLEAHKDDPAKAFAEPFYKYDKAGNRTQQVKAVRVEQVQKTGVWVHNHNGIADNATIVRVDVFEKGGKYYLVPIYSWQVAKGILPDRAVVQGKDEEDWTVMDDSFEFKFVLYANDLIKLTAKKNEFLGYFVSLNRATGAIDIRTHDTDSTKGKNGIFQSVGVKTALSFQKYQIDELGKEIRPCRLKKRPPVR

SEQ ID NO: 9 - protein, 1003 aa, Campylobacter lari
MRILGFDIGINSIGWAFVENDELKDCGVRIFTKAENPKNKESLALPRRNARSSRRRLKRRKARLIAIKRILAKELKLNYKDYVAADGELPKAYEGSLASVYELRYKALTQNLETKDLARVILHIAKHRGYMNKNEKKSNDAKKGKILSALKNNALKLENYQSVGEYFYKEFFQKYKKNTKNFIKIRNTKDNYNNCVLSSDLEKELKLILEKQKEFGYNYSEDFINEILKVAFFQRPLKDFSHLVGACTFFEEEKRACKNSYSAWEFVALTKIINEIKSLEKISGEIVPTQTINEVLNLILDKGSITYKKFRSCINLHESISFKSLKYDKENAENAKLIDFRKLVEFKKALGVHSLSRQELDQISTHITLIKDNVKLKTVLEKYNLSNEQINNLLEIEFNDYINLSFKALGMILPLMREGKRYDEACEIANLKPKTVDEKKDFLPAFCDSIFAHELSNPVVNRAISEYRKVLNALLKKYGKVHKIHLELARDVGLSKKAREKIEKEQKENQAVNAWALKECENIGLKASAKNILKLKLWKEQKEICIYSGNKISIEHLKDEKALEVDHIYPYSRSFDDSFINKVLVFTKENQEKLNKTPFEAFGKNIEKWSKIQTLAQNLPYKKKNKILDENFKDKQQEDFISRNLNDTRYIATLIAKYTKEYLNFLLLSENENANLKSGEKGSKIHVQTISGMLTSVLRHTWGFDKKDRNNHLHHALDAIIVAYSTNSIIKAFSDFRKNQELLKARFYAKELTSDNYKHQVKFFEPFKSFREKILSKIDEIFVSKPPRKRARRALHKDTFHSENKIIDKCSYNSKEGLQIALSCGRVRKIGTKYVENDTIVRVDIFKKQNKFYAIPIYAMDFALGILPNKIVITGKDKNNNPKQWQTIDESYEFCFSLYKNDLILLQKKNMQEPEFAYYNDFSISTSSICVEKHDNKFENLTSNQKLLFSNAKEGSVKVESLGIQNLKVFEKYIITPLGDKIKADFQPRENISLKTSKKYGLR

SEQ ID NO: 10 - protein, 1395 aa, Treponema denticola
MKKEIKDYFLGLDVGTGSVGWAVTDTDYKLLKANRKDLWGMRCFETAETAEVRRLHRGARRRIERRKKRIKLLQELFSQEIAKTDEGFFQRMKESPFYAEDKTILQENTLFNDKDFADKTYHKAYPTINHLIKAWIENKVKPDPRLLYLACHNIIKKRGHFLFEGDFDSENQFDTSIQALFEYLREDMEVDIDADSQKVKEILKDSSLKNSEKQSRLNKILGLKPSDKQKKAITNLISGNKINFADLYDNPDLKDAEKNSISFSKDDFDALSDDLASILGDSFELLLKAKAVYNCSVLSKVIGDEQYLSFAKVKIYEKHKTDLTKLKNVIKKHFPKDYKKVFGYNKNEKNNNNYSGYVGVCKTKSKKLIINNSVNQEDFYKFLKTILSAKSEIKEVNDILTEIETGTFLPKQISKSNAEIPYQLRKMELEKILSNAEKHFSFLKQKDEKGLSHSEKIIMLLTFKIPYYIGPINDNHKKFFPDRCWVVKKEKSPSGKTTPWNFFDHIDKEKTAEAFITSRTNFCTYLVGESVLPKSSLLYSEYTVLNEINNLQIIIDGKNICDIKLKQKIYEDLFKKYKKITQKQISTFIKHEGICNKTDEVIILGIDKECTSSLKSYIELKNIFGKQVDEISTKNMLEEIIRWATIYDEGEGKTILKTKIKAEYGKYCSDEQIKKILNLKFSGWGRLSRKFLETVTSEMPGFSEPVNIITAMRETQNNLMELLSSEFTFTENIKKINSGFEDAEKQFSYDGLVKPLFLSPSVKKMLWQTLKLVKEISHITQAPPKKIFIEMAKGAELEPARTKTRLKILQDLYNNCKNDADAFSSEIKDLSGKIENEDNLRLRSDKLYLYYTQLGKCMYCGKPIEIGHVFDTSNYDIDHIYPQSKIKDDSISNRVLVCSSCNKNKEDKYPLKSEIQSKQRGFWNFLQRNNFISLEKLNRLTRATPISDDETAKFIARQLVETRQATKVAAKVLEKMFPETKIVYSKAETVSMFRNKFDIVKCREINDFHHAHDAYLNIVVGNVYNTKFTNNPWNFIKEKRDNPKIADTYNYYKVFDYDVKRNNITAWEKGKTIITVKDMLKRNTPIYTRQAACKKGELFNQTIMKKGLGQHPLKKEGPFSNISKYGGYNKVSAAYYTLIEYEEKGNKIRSLETIPLYLVKDIQKDQDVLKSYLTDLLGKKEFKILVPKIKINSLLKINGFPCHITGKTNDSFLLRPAVQFCCSNNEVLYFKKIIRFSEIRSQREKIGKTISPYEDLSFRSYIKENLWKKTKNDEIGEKEFYDLLQKKNLEIYDMLLTKHKDTIYKKRPNSATIDILVKGKEKFKSLIIENQFEVILEILKLFSATRNVSDLQHIGGSKYSGVAKIGNKISSLDNCILIYQSITGIFEKRIDLLKV

SEQ ID NO: 11 - protein, 1345 aa, Streptococcus mutans
MKKPYSIGLDIGTNSVGWAVVTDDYKVPAKKMKVLGNTDKSHIEKNLLGALLFDSGNTAEDRRLKRTARRRYTRRRNRILYLQEIFSEEMGKVDDSFFHRLEDSFLVTEDKRGERHPIFGNLEEEVKYHENFPTIYHLRQYLADNPEKVDLRLVYLALAHIIKFRGHFLIEGKFDTRNNDVQRLFQEFLAVYDNTFENSSLQEQNVQVEEILTDKISKSAKKDRVLKLFPNEKSNGRFAEFLKLIVGNQADFKKHFELEEKAPLQFSKDTYEEELEVLLAQIGDNYAELFLSAKKLYDSILLSGILTVTDVGTKAPLSASMIQRYNEHQMDLAQLKQFIRQKLSDKYNEVFSDVSKDGYAGYIDGKTNQEAFYKYLKGLLNKIEGSGYFLDKIEREDFLRKQRTFDNGSIPHQIHLQEMRAIIRRQAEFYPFLADNQDRIEKLLTFRIPYYVGPLARGKSDFAWLSRKSADKITPWNFDEIVDKESSAEAFINRMTNYDLYLPNQKVLPKHSLLYEKFTVYNELTKVKYKTEQGKTAFFDANMKQEIFDGVFKVYRKVTKDKLMDFLEKEFDEFRIVDLTGLDKENKVFNASYGTYHDLCKILDKDFLDNSKNEKILEDIVLTLTLFEDREMIRKRLENYSDLLTKEQVKKLERRHYTGWGRLSAELIHGIRNKESRKTILDYLIDDGNSNRNFMQLINDDALSFKEEIAKAQVIGETDNLNQVVSDIAGSPAIKKGILQSLKIVDELVKIMGHQPENIVVEMARENQFTNQGRRNSQQRLKGLTDSIKEFGSQILKEHPVENSQLQNDRLFLYYLQNGRDMYTGEELDIDYLSQYDIDHIIPQAFIKDNSIDNRVLTSSKENRGKSDDVPSKDVVRKMKSYWSKLLSAKLITQRKFDNLTKAERGGLTDDDKAGFIKRQLVETRQITKHVARILDERFNTETDENNKKIRQVKIVTLKSNLVSNFRKEFELYKVREINDYHHAHDAYLNAVIGKALLGVYPQLEPEFVYGDYPHFHGHKENKATAKKFFYSNIMNFFKKDDVRTDKNGEIIWKKDEHISNIKKVLSYPQVNIVKKVEEQTGGFSKESILPKGNSDKLIPRKTKKFYWDTKKYGGFDSPIVAYSILVIADIEKGKSKKLKTVKALVGVTIMEKMTFERDPVAFLERKGYRNVQEENIIKLPKYSLFKLENGRKRLLASARELQKGNEIVLPNHLGTLLYHAKNIHKVDEPKHLDYVDKHKDEFKELLDVVSNFSKKYTLAEGNLEKIKELYAQNNGEDLKELASSFINLLTFTAIGAPATFKFFDKNIDRKRYTSTTEILNATLIHQSITGLYETRIDLNKLGGD

SEQ ID NO: 12 - protein, 1388 aa, Streptococcus thermophilus
MTKPYSIGLDIGTNSVGWAVTTDNYKVPSKKMKVLGNTSKKYIKKNLLGVLLFDSGITAEGRRLKRTARRRYTRRRNRILYLQEIFSTEMATLDDAFFQRLDDSFLVPDDKRDSKYPIFGNLVEEKAYHDEFPTIYHLRKYLADSTKKADLRLVYLALAHMIKYRGHFLIEGEFNSKNNDIQKNFQDFLDTYNAIFESDLSLENSKQLEEIVKDKISKLEKKDRILKLFPGEKNSGIFSEFLKLIVGNQADFRKCFNLDEKASLHFSKESYDEDLETLLGYIGDDYSDVFLKAKKLYDAILLSGFLTVTDNETEAPLSSAMIKRYNEHKEDLALLKEYIRNISLKTYNEVFKDDTKNGYAGYIDGKTNQEDFYVYLKKLLAEFEGADYFLEKIDREDFLRKQRTFDNGSIPYQIHLQEMRAILDKQAKFYPFLAKNKERIEKILTFRIPYYVGPLARGNSDFAWSIRKRNEKITPWNFEDVIDKESSAEAFINRMTSFDLYLPEEKVLPKHSLLYETFNVYNELTKVRFIAESMRDYQFLDSKQKKDIVRLYFKDKRKVTDKDIIEYLHAIYGYDGIELKGIEKQFNSSLSTYHDLLNIINDKEFLDDSSNEAIIEEIIHTLTIFEDREMIKQRLSKFENIFDKSVLKKLSRRHYTGWGKLSAKLINGIRDEKSGNTILDYLIDDGISNRNFMQLIHDDALSFKKKIQKAQIIGDEDKGNIKEVVKSLPGSPAIKKGILQSIKIVDELVKVMGGRKPESIVVEMARENQYTNQGKSNSQQRLKRLEKSLKELGSKILKENIPAKLSKIDNNALQNDRLYLYYLQNGKDMYTGDDLDIDRLSNYDIDHIIPQAFLKDNSIDNKVLVSSASNRGKSDDVPSLEVVKKRKTFWYQLLKSKLISQRKFDNLTKAERGGLSPEDKAGFIQRQLVETRQITKHVARLLDEKFNNKKDENNRAVRTVKIITLKSTLVSQFRKDFELYKVREINDFHHAHDAYLNAVVASALLKKYPKLEPEFVYGDYPKYNSFRERKSATEKVYFYSNIMNIFKKSISLADGRVIERPLIEVNEETGESVWNKESDLATVRRVLSYPQVNVVKKVEEQNHGLDRGKPKGLFNANLSSKPKPNSNENLVGAKEYLDPKKYGGYAGISNSFTVLVKGTIEKGAKKKITNVLEFQGISILDRINYRKDKLNFLLEKGYKDIELIIELPKYSLFELSDGSRRMLASILSTNNKRGEIHKGNQIFLSQKFVKLLYHAKRISNTINENHRKYVENHKKEFEELFYYILEFNENYVGAKKNGKLLNSAFQSWQNHSIDELCSSFIGPTGSERKGLFELTSRGSAADFEFLGVKIPRYRDYTPSSLLKDATLIHQSVTGLYETRIDLAKLGEG

SEQ ID NO: 13 - protein, 984 aa, Campylobacter jejuni
MARILAFDIGISSIGWAFSENDELKDCGVRIFTKVENPKTGESLALPRRLARSARKRLARRKARLNHLKHLIANEFKLNYEDYQSFDESLAKAYKGSLISPYELRFRALNELLSKQDFARVILHIAKRRGYDDIKNSDDKEKGAILKAIKQNEEKLANYQSVGEYLYKEYFQKFKENSKEFTNVRNKKESYERCIAQSFLKDELKLIFKKQREFGFSFSKKFEEEVLSVAFYKRALKDFSHLVGNCSFFTDEKRAPKNSPLAFMFVALTRIINLLNNLKNTEGILYTKDDLNALLNEVLKNGTLTYKQTKKLLGLSDDYEFKGEKGTYFIEFKKYKEFIKALGEHNLSQDDLNEIAKDITLIKDEIKLKKALAKYDLNQNQIDSLSKLEFKDHLNISFKALKLVTPLMLEGKKYDEACNELNLKVAINEDKKDFLPAFNETYYKDEVTNPVVLRAIKEYRKVLNALLKKYGKVHKINIELAREVGKNHSQRAKIEKEQNENYKAKKDAELECEKLGLKINSKNILKLRLFKEQKEFCAYSGEKIKISDLQDEKMLEIDHIYPYSRSFDDSYMNKVLVFTKQNQEKLNQTPFEAFGNDSAKWQKIEVLAKNLPTKKQKRILDKNYKDKEQKNFKDRNLNDTRYIARLVLNYTKDYLDFLPLSDDENTKLNDTQKGSKVHVEAKSGMLTSALRHTWGFSAKDRNNHLHHAIDAVIIAYANNSIVKAFSDFKKEQESNSAELYAKKISELDYKNKRKFFEPFSGFRQKVLDKIDEIFVSKPERKKPSGALHEETFRKEEEFYQSYGGKEGVLKALELGKIRKVNGKIVKNGDMFRVDIFKHKKTNKFYAVPIYTMDFALKVLPNKAVARSKKGEIKDWILMDENYEFCFSLYKDSLILIQTKDMQEPEFVYYNAFTSSTVSLIVSKHDNKFETLSKNQKILFKNANEKEVIAKSIGIQNLKVFEKYIVSALGEVTKAEFRQREDFKK

SEQ ID NO: 14 - protein, 1056 aa, Pasteurella multocida
MQTTNLSYILGLDLGIASVGWAVVEINENEDPIGLIDVGVRIFERAEVPKTGESLALSRRLARSTRRLIRRRAHRLLLAKRFLKREGILSTIDLEKGLPNQAWELRVAGLERRLSAIEWGAVLLHLIKHRGYLSKRKNESQTNNKELGALLSGVAQNHQLLQSDDYRTPAELALKKFAKEEGHIRNQRGAYTHTFNRLDLLAELNLLFAQQHQFGNPHCKEHIQQYMTELLMWQKPALSGEAILKMLGKCTHEKNEFKAAKHTYSAERFVWLTKLNNLRILEDGAERALNEEERQLLINHPYEKSKLTYAQVRKLLGLSEQAIFKHLRYSKENAESATFMELKAWHAIRKALENQGLKDTWQDLAKKPDLLDEIGTAFSLYKTDEDIQQYLTNKVPNSVINALLVSLNFDKFIELSLKSLRKILPLMEQGKRYDQACREIYGHHYGEANQKTSQLLPAIPAQEIRNPVVLRTLSQARKVINAIIRQYGSPARVHIETGRELGKSFKERREIQKQQEDNRTKRESAVQKFKELFSDFSSEPKSKDILKFRLYEQQHGKCLYSGKEINIHRLNEKGYVEIDHALPFSRTWDDSFNNKVLVLASENQNKGNQTPYEWLQGKINSERWKNFVALVLGSQCSAAKKQRLLTQVIDDNKFIDRNLNDTRYIARFLSNYIQENLLLVGKNKKNVFTPNGQITALLRSRWGLIKARENNNRHHALDAIVVACATPSMQQKITRFIRFKEVHPYKIENRYEMVDQESGEIISPHFPEPWAYFRQEVNIRVFDNHPDTVLKEMLPDRPQANHQFVQPLFVSRAPTRKMSGQGHMETIKSAKRLAEGISVLRIPLTQLKPNLLENMVNKEREPALYAGLKARLAEFNQDPAKAFATPFYKQGGQQVKAIRVEQVQKSGVLVRENNGVADNASIVRTDVFIKNNKFFLVPIYTWQVAKGILPNKAIVAHKNEDEWEEMDEGAKFKFSLFPNDLVELKTKKEYFFGYYIGLDRATGNISLKEHDGEISKGKDGVYRVGVKLALSFEKYQVDELGKNRQICRPQQRQPVR

SEQ ID NO: 15 - protein, 1629 aa, Francisella tularensis
MNFKILPIAIDLGVKNTGVFSAFYQKGTSLERLDNKNGKVYELSKDSYTLLMNNRTARRHQRRGIDRKQLVKRLFKLIWTEQLNLEWDKDTQQAISFLFNRRGFSFITDGYSPEYLNIVPEQVKAILMDIFDDYNGEDDLDSYLKLATEQESKISEIYNKLMQKILEFKLMKLCTDIKDDKVSTKTLKEITSYEFELLADYLANYSESLKTQKFSYTDKQGNLKELSYYHHDKYNIQEFLKRHATINDRILDTLLTDDLDIWNFNFEKFDFDKNEEKLQNQEDKDHIQAHLHHFVFAVNKIKSEMASGGRHRSQYFQEITNVLDENNHQEGYLKNFCENLHNKKYSNLSVKNLVNLIGNLSNLELKPLRKYFNDKIHAKADHWDEQKFTETYCHWILGEWRVGVKDQDKKDGAKYSYKDLCNELKQKVTKAGLVDFLLELDPCRTIPPYLDNNNRKPPKCQSLILNPKFLDNQYPNWQQYLQELKKLQSIQNYLDSFETDLKVLKSSKDQPYFVEYKSSNQQIASGQRDYKDLDARILQFIFDRVKASDELLLNEIYFQAKKLKQKASSELEKLESSKKLDEVIANSQLSQILKSQHTNGIFEQGTFLHLVCKYYKQRQRARDSRLYIMPEYRYDKKLHKYNNTGRFDDDNQLLTYCNHKPRQKRYQLLNDLAGVLQVSPNFLKDKIGSDDDLFISKWLVEHIRGFKKACEDSLKIQKDNRGLLNHKINIARNTKGKCEKEIFNLICKIEGSEDKKGNYKHGLAYELGVLLFGEPNEASKPEFDRKIKKFNSIYSFAQIQQIAFAERKGNANTCAVCSADNAHRMQQIKITEPVEDNKDKIILSAKAQRLPAIPTRIVDGAVKKMATILAKNIVDDNWQNIKQVLSAKHQLHIPIITESNAFEFEPALADVKGKSLKDRRKKALERISPENIFKDKNNRIKEFAKGISAYSGANLTDGDFDGAKEELDHIIPRSHKKYGTLNDEANLICVTRGDNKNKGNRIFCLRDLADNYKLKQFETTDDLEIEKKIADTIWDANKKDFKFGNYRSFINLTPQEQKAFRHALFLADENPIKQAVIRAINNRNRTFVNGTQRYFAEVLANNIYLRAKKENLNTDKISFDYFGIPTIGNGRGIAEIRQLYEKVDSDIQAYAKGDKPQASYSHLIDAMLAFCIAADEHRNDGSIGLEIDKNYSLYPLDKNTGEVFTKDIFSQIKITDNEFSDKKLVRKKAIEGFNTHRQMTRDGIYAENYLPILIHKELNEVRKGYTWKNSEEIKIFKGKKYDIQQLNNLVYCLKFVDKPISIDIQISTLEELRNILTTNNIAATAEYYYINLKTQKLHEYYIENYNTALGYKKYSKEMEFLRSLAYRSERVKIKSIDDVKQVLDKDSNFIIGKITLPFKKEWQRLYREWQNTTIKDDYEFLKSFFNVKSITKLHKKVRKDFSLPISTNEGKFLVKRKTWDNNFIYQILNDSDSRADGTKPFIPAFDISKNEIVEAIIDSFTSKNIFWLPKNIELQKVDNKNIFAIDTSKWFEVETPSDLRDIGIATIQYKIDNNSRPKVRVKLDYVIDDDSKINYFMNHSLLKSRYPDKVLEILKQSTIIEFESSGFNKTIKEMLGMKLAGIYNETSNN

SEQ ID NO: 16 - protein, 1371 aa, Lactobacillus buchneri
MKVNNYHIGLDIGTSSIGWVAIGKDGKPLRVKGKTAIGARLFQEGNPAADRRMFRTTRRRLSRRKWRLKLLEEIFDPYITPVDSTFFARLKQSNLSPKDSRKEFKGSMLFPDLTDMQYHKNYPTIYHLRHALMTQDKKFDIRMVYLAIHHIVKYRGNFLNSTPVDSFKASKVDFVDQFKKLNELYAAINPEESFKINLANSEDIGHQFLDPSIRKFDKKKQIPKIVPVMMNDKVTDRLNGKIASEIIHAILGYKAKLDVVLQCTPVDSKPWALKFDDEDIDAKLEKILPEMDENQQSIVAILQNLYSQVTLNQIVPNGMSLSESMIEKYNDHHDHLKLYKKLIDQLADPKKKAVLKKAYSQYVGDDGKVIEQAEFWSSVKKNLDDSELSKQIMDLIDAEKFMPKQRTSQNGVIPHQLHQRELDEIIEHQSKYYPWLVEINPNKHDLHLAKYKIEQLVAFRVPYYVGPMITPKDQAESAETVFSWMERKGTETGQITPWNFDEKVDRKASANRFIKRMTTKDTYLIGEDVLPDESLLYEKFKVLNELNMVRVNGKLLKVADKQAIFQDLFENYKHVSVKKLQNYIKAKTGLPSDPEISGLSDPEHFNNSLGTYNDFKKLFGSKVDEPDLQDDFEKIVEWSTVFEDKKILREKLNEITWLSDQQKDVLESSRYQGWGRLSKKLLTGIVNDQGERIIDKLWNTNKNFMQIQSDDDFAKRIHEANADQMQAVDVEDVLADAYTSPQNKKAIRQVVKVVDDIQKAMGGVAPKYISIEFTRSEDRNPRRTISRQRQLENTLKDTAKSLAKSINPELLSELDNAAKSKKGLTDRLYLYFTQLGKDIYTGEPINIDELNKYDIDHILPQAFIKDNSLDNRVLVLTAVNNGKSDNVPLRMFGAKMGHFWKQLAEAGLISKRKLKNLQTDPDTISKYAMHGFIRRQLVETSQVIKLVANILGDKYRNDDTKIIEITARMNHQMRDEFGFIKNREINDYHHAFDAYLTAFLGRYLYHRYIKLRPYFVYGDFKKFREDKVTMRNFNFLHDLTDDTQEKIADAETGEVIWDRENSIQQLKDVYHYKFMLISHEVYTLRGAMFNQTVYPASDAGKRKLIPVKADRPVNVYGGYSGSADAYMAIVRIHNKKGDKYRVVGVPMRALDRLDAAKNVSDADFDRALKDVLAPQLTKTKKSRKTGEITQVIEDFEIVLGKVMYRQLMIDGDKKFMLGSSTYQYNAKQLVLSDQSVKTLASKGRLDPLQESMDYNNVYTEILDKVNQYFSLYDMNKFRHKLNLGFSKFISFPNHNVLDGNTKVSSGKREILQEILNGLHANPTFGNLKDVGITTPFGQLQQPNGILLSDETKIRYQSPTGLFERTVSLKDL

SEQ ID NO: 17 - protein, 1334 aa, Listeria innocua
MKKPYTIGLDIGTNSVGWAVLTDQYDLVKRKMKIAGDSEKKQIKKNFWGVRLFDEGQTAADRRMARTARRRIERRRNRISYLQGIFAEEMSKTDANFFCRLSDSFYVDNEKRNSRHPFFATIEEEVEYHKNYPTIYHLREELVNSSEKADLRLVYLALAHIIKYRGNFLIEGALDTQNTSVDGIYKQFIQTYNQVFASGIEDGSLKKLEDNKDVAKILVEKVTRKEKLERILKLYPGEKSAGMFAQFISLIVGSKGNFQKPFDLIEKSDIECAKDSYEEDLESLLALIGDEYAELFVAAKNAYSAVVLSSIITVAETETNAKLSASMIERFDTHEEDLGELKAFIKLHLPKHYEEIFSNTEKHGYAGYIDGKTKQADFYKYMKMTLENIEGADYFIAKIEKENFLRKQRTFDNGAIPHQLHLEELEAILHQQAKYYPFLKENYDKIKSLVTFRIPYFVGPLANGQSEFAWLTRKADGEIRPWNIEEKVDFGKSAVDFIEKMTNKDTYLPKENVLPKHSLCYQKYLVYNELTKVRYINDQGKTSYFSGQEKEQIFNDLFKQKRKVKKKDLELFLRNMSHVESPTIEGLEDSFNSSYSTYHDLLKVGIKQEILDNPVNTEMLENIVKILTVFEDKRMIKEQLQQFSDVLDGVVLKKLERRHYTGWGRLSAKLLMGIRDKQSHLTILDYLMNDDGLNRNLMQLINDSNLSFKSIIEKEQVTTADKDIQSIVADLAGSPAIKKGILQSLKIVDELVSVMGYPPQTIVVEMARENQTTGKGKNNSRPRYKSLEKAIKEFGSQILKEHPTDNQELRNNRLYLYYLQNGKDMYTGQDLDIHNLSNYDIDHIVPQSFITDNSIDNLVLTSSAGNREKGDDVPPLEIVRKRKVFWEKLYQGNLMSKRKFDYLTKAERGGLTEADKARFIHRQLVETRQITKNVANILHQRFNYEKDDHGNTMKQVRIVTLKSALVSQFRKQFQLYKVRDVNDYHHAHDAYLNGVVANTLLKVYPQLEPEFVYGDYHQFDWFKANKATAKKQFYTNIMLFFAQKDRIIDENGEILWDKKYLDTVKKVMSYRQMNIVKKTEIQKGEFSKATIKPKGNSSKLIPRKTNWDPMKYGGLDSPNMAYAVVIEYAKGKNKLVFEKKIIRVTIMERKAFEKDEKAFLEEQGYRQPKVLAKLPKYTLYECEEGRRRMLASANEAQKGNQQVLPNHLVTLLHHAANCEVSDGKSLDYIESNREMFAELLAHVSEFAKRYTLAEANLNKINQLFEQNKEGDIKAIAQSFVDLMAFNAMGAPASFKFFETTIERKRYNNLKELLNSTIIYQSITGLYESRKRLDD

SEQ ID NO: 18 - protein, 1372 aa, Legionella pneumophila
MESSQILSPIGIDLGGKFTGVCLSHLEAFAELPNHANTKYSVILIDHNNFQLSQAQRRATRHRVRNKKRNQFVKRVALQLFQHILSRDLNAKEETALCHYLNNRGYTYVDTDLDEYIKDETTINLLKELLPSESEHNFIDWFLQKMQSSEFRKILVSKVEEKKDDKELKNAVKNIKNFITGFEKNSVEGHRHRKVYFENIKSDITKDNQLDSIKKKIPSVCLSNLLGHLSNLQWKNLHRYLAKNPKQFDEQTFGNEFLRMLKNFRHLKGSQESLAVRNLIQQLEQSQDYISILEKTPPEITIPPYEARTNTGMEKDQSLLLNPEKLNNLYPNWRNLIPGIIDAHPFLEKDLEHTKLRDRKRIISPSKQDEKRDSYILQRYLDLNKKIDKFKIKKQLSFLGQGKQLPANLIETQKEMETHFNSSLVSVLIQIASAYNKEREDAAQGIWFDNAFSLCELSNINPPRKQKILPLLVGAILSEDFINNKDKWAKFKIFWNTHKIGRTSLKSKCKEIEEARKNSGNAFKIDYEEALNHPEHSNNKALIKIIQTIPDIIQAIQSHLGHNDSQALIYHNPFSLSQLYTILETKRDGFHKNCVAVTCENYWRSQKTEIDPEISYASRLPADSVRPFDGVLARMMQRLAYEIAMAKWEQIKHIPDNSSLLIPIYLEQNRFEFEESFKKIKGSSSDKTLEQAIEKQNIQWEEKFQRIINASMNICPYKGASIGGQGEIDHIYPRSLSKKHFGVIFNSEVNLIYCSSQGNREKKEEHYLLEHLSPLYLKHQFGTDNVSDIKNFISQNVANIKKYISFHLLTPEQQKAARHALFLDYDDEAFKTITKFLMSQQKARVNGTQKFLGKQIMEFLSTLADSKQLQLEFSIKQITAEEVHDHRELLSKQEPKLVKSRQQSFPSHAIDATLTMSIGLKEFPQFSQELDNSWFINHLMPDEVHLNPVRSKEKYNKPNISSTPLFKDSLYAERFIPVWVKGETFAIGFSEKDLFEIKPSNKEKLFTLLKTYSTKNPGESLQELQAKSKAKWLYFPINKTLALEFLHHYFHKEIVTPDDTTVCHFINSLRYYTKKESITVKILKEPMPVLSVKFESSKKNVLGSFKHTIALPATKDWERLFNHPNFLALKANPAPNPKEFNEFIRKYFLSDNNPNSDIPNNGHNIKPQKHKAVRKVFSLPVIPGNAGTMMRIRRKDNKGQPLYQLQTIDDTPSMGIQINEDRLVKQEVLMDAYKTRNLSTIDGINNSEGQAYATFDNWLTLPVSTFKPEIIKLEMKPHSKTRRYIRITQSLADFIKTIDEALMIKPSDSIDDPLNMPNEIVCKNKLFGNELKPRDGKMKIVSTGKIVTYEFESDSTPQWIQTLYVTQLKKQP

SEQ ID NO: 19 - protein, 1082 aa, Neisseria lactamica
MAAFKPNPMNYILGLDIGIASVGWAMVEVDEEENPIRLIDLGVRVFERAEVPKTGDSLAMARRLARSVRRLTRRRAHRLLRARRLLKREGVLQDADFDENGLVKSLPNTPWQLRAAALDRKLTCLEWSAVLLHLVKHRGYLSQRKNEGETADKELGALLKGVADNAHALQTGDFRTPAELALNKFEKESGHIRNQRGDYSHTFSRKDLQAELNLLFEKQKEFGNPHVSDGLKEDIETLLMAQRPALSGDAVQKMLGHCTFEPAEPKAAKNTYTAERFIWLTKLNNLRILEQGSERPLTDTERATLMDEPYRKSKLTYAQARKLLGLEDTAFFKGLRYGKDNAEASTLMEMKAYHAISRALEKEGLKDKKSPLNLSTELQDEIGTAFSLFKTDKDITGRLKDRVQPEILEALLKHISFDKFVQISLKALRRIVPLMEQGKRYDEACAEIYGDHYCKKNAEEKIYLPPIPADEIRNPVVLRALSQARKVINCVVRRYGSPARIHIETAREVGKSFKDRKEIEKRQEENRKDREKAAAKFREYFPNFVGEPKSKDILKLRLYEQQHGKCLYSGKEINLVRLNEKGYVEIDHALPFSRTWDDSFNNKVLVLGSENQNKGNQTPYEYFNGKDNSREWQEFKARVETSRFPRSKKQRILLQKFDEEGFKERNLNDTRYVNRFLCQFVADHILLTGKGKRRVFASNGQITNLLRGFWGLRKVRTENDRHHALDAVVVACSTVAMQQKITRFVRYKEMNAFDGKTIDKETGEVLHQKAHFPQPWEFFAQEVMIRVFGKPDGKPEFEEADTPEKLRTLLAEKLSSRPEAVHEYVTPLFVSRAPNRKMSGQGHMETVKSAKRLDEGISVLRVPLTQLKLKGLEKMVNREREPKLYDALKAQLETHKDDPAKAFAEPFYKYDKAGSRTQQVKAVRIEQVQKTGVWVRNHNGIADNATMVRVDVFEKGGKYYLVPIYSWQVAKGILPDRAVVAFKDEEDWTVMDDSFEFRFVLYANDLIKLTAKKNEFLGYFVSLNRATGAIDIRTHDTDSTKGKNGIFQSVGVKTALSFQKNQIDELGKEIRPCRLKKRPPVR

SEQ ID NO: 20 - protein, 1082 aa, Neisseria meningitidis; identical to SEQ ID NO: 4

SEQ ID NO: 21 - protein, 1187 aa, Bifidobacterium longum
MLSRQLLGASHLARPVSYSYNVQDNDVHCSYGERCFMRGKRYRIGIDVGLNSVGLAAVEVSDENSPVRLLNAQSVIHDGGVDPQKNKEAITRKNMSGVARRTRRMRRRKRERLHKLDMLLGKFGYPVIEPESLDKPFEEWHVRAELATRYIEDDELRRESISIALRHMARHRGWRNPYRQVDSLISDNPYSKQYGELKEKAKAYNDDATAAEEESTPAQLVVAMLDAGYAEAPRLRWRTGSKKPDAEGYLPVRLMQEDNANELKQIFRVQRVPADEWKPLFRSVFYAVSPKGSAEQRVGQDPLAPEQARALKASLAFQEYRIANVITNLRIKDASAELRKLTVDEKQSIYDQLVSPSSEDITWSDLCDFLGFKRSQLKGVGSLTEDGEERISSRPPRLTSVQRIYESDNKIRKPLVAWWKSASDNEHEAMIRLLSNTVDIDKVREDVAYASAIEFIDGLDDDALTKLDSVDLPSGRAAYSVETLQKLTRQMLTTDDDLHEARKTLFNVTDSWRPPADPIGEPLGNPSVDRVLKNVNRYLMNCQQRWGNPVSVNIEHVRSSFSSVAFARKDKREYEKNNEKRSIFRSSLSEQLRADEQMEKVRESDLRRLEAIQRQNGQCLYCGRTITFRTCEMDHIVPRKGVGSTNTRTNFAAVCAECNRMKSNTPFAIWARSEDAQTRGVSLAEAKKRVTMFTFNPKSYAPREVKAFKQAVIARLQQTEDDAAIDNRSIESVAWMADELHRRIDWYFNAKQYVNSASIDDAEAETMKTTVSVFQGRVTASARRAAGIEGKIHFIGQQSKTRLDRRHHAVDASVIAMMNTAAAQTLMERESLRESQRLIGLMPGERSWKEYPYEGTSRYESFHLWLDNMDVLLELLNDALDNDRIAVMQSQRYVLGNSIAHDATIHPLEKVPLGSAMSADLIRRASTPALWCALTRLPDYDEKEGLPEDSHREIRVHDTRYSADDEMGFFASQAAQIAVQEGSADIGSAIHHARVYRCWKTNAKGVRKYFYGMIRVFQTDLLRACHDDLFTVPLPPQSISMRYGEPRVVQALQSGNAQYLGSLVVGDEIEMDFSSLDVDGQIGEYLQFFSQFSGGNLAWKHWVVDGFFNQTQLRIRPRYLAAEGLAKAFSDDVVPDGVQKIVTKQGWLPPVNTASKTAVRIVRRNAFGEPRLSSAHHMPCSWQWRHE

SEQ ID NO: 22 - protein, 1101 aa, Akkermansia muciniphila
MSRSLTFSFDIGYASIGWAVIASASHDDADPSVCGCGTVLFPKDDCQAFKRREYRRLRRNIRSRRVRIERIGRLLVQAQIITPEMKETSGHPAPFYLASEALKGHRTLAPIELWHVLRWYAHNRGYDNNASWSNSLSEDGGNGEDTERVKHAQDLMDKHGTATMAETICRELKLEEGKADAPMEVSTPAYKNLNTAFPRLIVEKEVRRILELSAPLIPGLTAEIIELIAQHHPLTTEQRGVLLQHGIKLARRYRGSLLFGQLIPRFDNRIISRCPVTWAQVYEAELKKGNSEQSARERAEKLSKVPTANCPEFYEYRMARILCNIRADGEPLSAEIRRELMNQARQEGKLTKASLEKAISSRLGKETETNVSNYFTLHPDSEEALYLNPAVEVLQRSGIGQILSPSVYRIAANRLRRGKSVTPNYLLNLLKSRGESGEALEKKIEKESKKKEADYADTPLKPKYATGRAPYARTVLKKVVEEILDGEDPTRPARGEAHPDGELKAHDGCLYCLLDTDSSVNQHQKERRLDTMTNNHLVRHRMLILDRLLKDLIQDFADGQKDRISRVCVEVGKELTTFSAMDSKKIQRELTLRQKSHTDAVNRLKRKLPGKALSANLIRKCRIAMDMNWTCPFTGATYGDHELENLELEHIVPHSFRQSNALSSLVLTWPGVNRMKGQRTGYDFVEQEQENPVPDKPNLHICSLNNYRELVEKLDDKKGHEDDRRRKKKRKALLMVRGLSHKHQSQNHEAMKEIGMTEGMMTQSSHLMKLACKSIKTSLPDAHIDMIPGAVTAEVRKAWDVFGVFKELCPEAADPDSGKILKENLRSLTHLHHALDACVLGLIPYIIPAHHNGLLRRVLAMRRIPEKLIPQVRPVANQRHYVLNDDGRMMLRDLSASLKENIREQLMEQRVIQHVPADMGGALLKETMQRVLSVDGSGEDAMVSLSKKKDGKKEKNQVKASKLVGVFPEGPSKLKALKAAIEIDGNYGVALDPKPVVIRHIKVFKRIMALKEQNGGKPVRILKKGMLIHLTSSKDPKHAGVWRIESIQDSKGGVKLDLQRAHCAVPKNKTHECNWREVDLISLLKKYQMKRYPTSYTGTPR

SEQ ID NO: 23 - protein, 1498 aa, Odoribacter laneus
METTLGIDLGTNSIGLALVDQEEHQILYSGVRIFPEGINKDTIGLGEKEESRNATRRAKRQMRRQYFRKKLRKAKLLELLIAYDMCPLKPEDVRRWKNWDKQQKSTVRQFPDTPAFREWLKQNPYELRKQAVTEDVTRPELGRILYQMIQRRGFLSSRKGKEEGKIFTGKDRMVGIDETRKNLQKQTLGAYLYDIAPKNGEKYRFRTERVRARYTLRDMYIREFEIIWQRQAGHLGLAHEQATRKKNIFLEGSATNVRNSKLITHLQAKYGRGHVLIEDTRITVTFQLPLKEVLGGKIEIEEEQLKFKSNESVLFWQRPLRSQKSLLSKCVFEGRNFYDPVHQKWIIAGPTPAPLSHPEFEEFRAYQFINNIIYGKNEHLTAIQREAVFELMCTESKDFNFEKIPKHLKLFEKFNFDDTTKVPACTTISQLRKLFPHPVWEEKREEIWHCFYFYDDNTLLFEKLQKDYALQTNDLEKIKKIRLSESYGNVSLKAIRRINPYLKKGYAYSTAVLLGGIRNSFGKRFEYFKEYEPEIEKAVCRILKEKNAEGEVIRKIKDYLVHNRFGFAKNDRAFQKLYHHSQAITTQAQKERLPETGNLRNPIVQQGLNELRRTVNKLLATCREKYGPSFKFDHIHVEMGRELRSSKTEREKQSRQIRENEKKNEAAKVKLAEYGLKAYRDNIQKYLLYKEIEEKGGTVCCPYTGKTLNISHTLGSDNSVQIEHIIPYSISLDDSLANKTLCDATFNREKGELTPYDFYQKDPSPEKWGASSWEEIEDRAFRLLPYAKAQRFIRRKPQESNEFISRQLNDTRYISKKAVEYLSAICSDVKAFPGQLTAELRHLWGLNNILQSAPDITFPLPVSATENHREYYVITNEQNEVIRLFPKQGETPRTEKGELLLTGEVERKVFRCKGMQEFQTDVSDGKYWRRIKLSSSVTWSPLFAPKPISADGQIVLKGRIEKGVFVCNQLKQKLKTGLPDGSYWISLPVISQTFKEGESVNNSKLTSQQVQLFGRVREGIFRCHNYQCPASGADGNFWCTLDTDTAQPAFTPIKNAPPGVGGGQIILTGDVDDKGIFHADDDLHYELPASLPKGKYYGIFTVESCDPTLIPIELSAPKTSKGENLIEGNIWVDEHTGEVRFDPKKNREDQRHHAIDAIVIALSSQSLFQRLSTYNARRENKKRGLDSTEHFPSPWPGFAQDVRQSVVPLLVSYKQNPKTLCKISKTLYKDGKKIHSCGNAVRGQLHKETVYGQRTAPGATEKSYHIRKDIRELKTSKHIGKVVDITIRQMLLKHLQENYHIDITQEFNIPSNAFFKEGVYRIFLPNKHGEPVPIKKIRMKEELGNAERLKDNINQYVNPRNNHHVMIYQDADGNLKEEIVSFWSVIERQNQGQPIYQLPREGRNIVSILQINDTFLIGLKEEEPEVYRNDLSTLSKHLYRVQKLSGMYYTFRHHLASTLNNEREEFRIQSLEAWKRANPVKVQIDEIGRITFLNGPLC

SEQ ID NO: 24 - protein, 1368 aa, Streptococcus pyogenes
MDKKYSIGLAIGTNSVGWAVITDEYKVPSKKFKVLGNTDRHSIKKNLIGALLFDSGETAEATRLKRTARRRYTRRKNRICYLQEIFSNEMAKVDDSFFHRLEESFLVEEDKKHERHPIFGNIVDEVAYHEKYPTIYHLRKKLVDSTDKADLRLIYLALAHMIKFRGHFLIEGDLNPDNSDVDKLFIQLVQTYNQLFEENPINASGVDAKAILSARLSKSRRLENLIAQLPGEKKNGLFGNLIALSLGLTPNFKSNFDLAEDAKLQLSKDTYDDDLDNLLAQIGDQYADLFLAAKNLSDAILLSDILRVNTEITKAPLSASMIKRYDEHHQDLTLLKALVRQQLPEKYKEIFFDQSKNGYAGYIDGGASQEEFYKFIKPILEKMDGTEELLVKLNREDLLRKQRTFDNGSIPHQIHLGELHAILRRQEDFYPFLKDNREKIEKILTFRIPYYVGPLARGNSRFAWMTRKSEETITPWNFEEVVDKGASAQSFIERMTNFDKNLPNEKVLPKHSLLYEYFTVYNELTKVKYVTEGMRKPAFLSGEQKKAIVDLLFKTNRKVTVKQLKEDYFKKIECFDSVEISGVEDRFNASLGTYHDLLKIIKDKDFLDNEENEDILEDIVLTLTLFEDREMIEERLKTYAHLFDDKVMKQLKRRRYTGWGRLSRKLINGIRDKQSGKTILDFLKSDGFANRNFMQLIHDDSLTFKEDIQKAQVSGQGDSLHEHIANLAGSPAIKKGILQTVKVVDELVKVMGRHKPENIVIEMARENQTTQKGQKNSRERMKRIEEGIKELGSQILKEHPVENTQLQNEKLYLYYLQNGRDMYVDQELDINRLSDYDVDAIVPQSFLKDDSIDNKVLTRSDKNRGKSDNVPSEEVVKKMKNYWRQLLNAKLITQRKFDNLTKAERGGLSELDKAGFIKRQLVETRQITKHVAQILDSRMNTKYDENDKLIREVKVITLKSKLVSDFRKDFQFYKVREINNYHHAHDAYLNAVVGTALIKKYPKLESEFVYGDYKVYDVRKMIAKSEQEIGKATAKYFFYSNIMNFFKTEITLANGEIRKRPLIETNGETGEIVWDKGRDFATVRKVLSMPQVNIVKKTEVQTGGFSKESILPKRNSDKLIARKKDWDPKKYGGFDSPTVAYSVLVVAKVEKGKSKKLKSVKELLGITIMERSSFEKNPIDFLEAKGYKEVKKDLIIKLPKYSLFELENGRKRMLASAGELQKGNELALPSKYVNFLYLASHYEKLKGSPEDNEQKQLFVEQHKHYLDEIIEQISEFSKRVILADANLDKVLSAYNKHRDKPIREQAENIIHLFTLTNLGAPAAFKYFDTTIDRKRYTSTKEVLDATLIHQSITGLYETRIDLSQLGGD

SEQ ID NO: 25 - protein, 1300 aa, Francisella tularensis
MSIYQEFVNKYSLSKTLRFELIPQGKTLENIKARGLILDDEKRAKDYKKAKQIIDKYHQFFIEEILSSVCISEDLLQNYSDVYFKLKKSDDDNLQKDFKSAKDTIKKQISEYIKDSEKFKNLFNQNLIDAKKGQESDLILWLKQSKDNGIELFKANSDITDIDEALEIIKSFKGWTTYFKGFHENRKNVYSSNDIPTSIIYRIVDDNLPKFLENKAKYESLKDKAPEAINYEQIKKDLAEELTFDIDYKTSEVNQRVFSLDEVFEIANFNNYLNQSGITKFNTIIGGKFVNGENTKRKGINEYINLYSQQINDKTLKKYKMSVLFKQILSDTESKSFVIDKLEDDSDVVTTMQSFYEQIAAFKTVEEKSIKETLSLLFDDLKAQKLDLSKIYFKNDKSLTDLSQQVFDDYSVIGTAVLEYITQQIAPKNLDNPSKKEQELIAKKTEKAKYLSLETIKLALEEFNKHRDIDKQCRFEEILANFAAIPMIFDEIAQNKDNLAQISIKYQNQGKKDLLQASAEDDVKAIKDLLDQTNNLLHKLKIFHISQSEDKANILDKDEHFYLVFEECYFELANIVPLYNKIRNYITQKPYSDEKFKLNFENSTLANGWDKNKEPDNTAILFIKDDKYYLGVMNKKNNKIFDDKAIKENKGEGYKKIVYKLLPGANKMLPKVFFSAKSIKFYNPSEDILRIRNHSTHTKNGSPQKGYEKFEFNIEDCRKFIDFYKQSISKHPEWKDFGFRFSDTQRYNSIDEFYREVENQGYKLTFENISESYIDSVVNQGKLYLFQIYNKDFSAYSKGRPNLHTLYWKALFDERNLQDVVYKLNGEAELFYRKQSIPKKITHPAKEAIANKNKDNPKKESVFEYDLIKDKRFTEDKFFFHCPITINFKSSGANKFNDEINLLLKEKANDVHILSIDRGERHLAYYTLVDGKGNIIKQDTFNIIGNDRMKTNYHDKLAAIEKDRDSARKDWKKINNIKEMKEGYLSQVVHEIAKLVIEYNAIVVFEDLNFGFKRGRFKVEKQVYQKLEKMLIEKLNYLVFKDNEFDKTGGVLRAYQLTAPFETFKKMGKQTGIIYYVPAGFTSKICPVTGFVNQLYPKYESVSKSQEFFSKFDKICYNLDKGYFEFSFDYKNFGDKAAKGKWTIASFGSRLINFRNSDKNHNWDTREVYPTKELEKLLKDYSIEYGHGECIKAAICGESDKKFFAKLTSVLNTILQMRNSKTGTELDYLISPVADVNGNFFDSRQAPKNMPQDADANGAYHIGLKGLMLLGRIKNNQEGKKLNLVIKNEEYFEFVQNRNN

SEQ ID NO: 26 - protein, 1228 aa, Unknown
  Lachnospiraceae bacterium
AASKLEKFTNCYSLSKTLRFKAIPVGKTQENIDNKRLLVEDEKRAEDYKGVKKLLDRYYLSFINDVLHSIKLKNLNNYISLFRKKTRTEKENKELENLEINLRKEIAKAFKGAAGYKSLFKKDIIETILPEAADDKDEIALVNSFNGFTTAFTGFFDNRENMFSEEAKSTSIAFRCINENLTRYISNMDIFEKVDAIFDKHEVQEIKEKILNSDYDVEDFFEGEFFNFVLTQEGIDVYNAIIGGFVTESGEKIKGLNEYINLYNAKTKQALPKFKPLYKQVLSDRESLSFYGEGYTSDEEVLEVFRNTLNKNSEIFSSIKKLEKLFKNFDEYSSAGIFVKNGPAISTISKDIFGEWNLIRDKWNAEYDDIHLKKKAVVTEKYEDDRRKSFKKIGSFSLEQLQEYADADLSVVEKLKEIIIQKVDEIYKVYGSSEKLFDADFVLEKSLKKNDAVVAIMKDLLDSVKSFENYIKAFFGEGKETNRDESFYGDFVLAYDILLKVDHIYDAIRNYVTQKPYSKDKFKLYFQNPQFMGGWDKDKETDYRATILRYGSKYYLAIMDKKYAKCLQKIDKDDVNGNYEKINYKLLPGPNKMLPKVFFSKKWMAYYNPSEDIQKIYKNGTFKKGDMFNLNDCHKLIDFFKDSISRYPKWSNAYDFNFSETEKYKDIAGFYREVEEQGYKVSFESASKKEVDKLVEEGKLYMFQIYNKDFSDKSHGTPNLHTMYFKLLFDENNHGQIRLSGGAELFMRRASLKKEELVVHPANSPIANKNPDNPKKTTTLSYDVYKDKRFSEDQYELHIPIAINKCPKNIFKINTEVRVLLKHDDNPYVIGIDRGERNLLYIVVVDGKGNIVEQYSLNEIINNFNGIRIKTDYHSLLDKKEKERFEARQNWTSIENIKELKAGYISQVVHKICELVEKYDAVIALEDLNSGFKNSRVKVEKQVYQKFEKMLIDKLNYMVDKKSNPCATGGALKGYQITNKFESFKSMSTQNGFIFYIPAWLTSKIDPSTGFVNLLKTKYTSIADSKKFISSFDRIMYVPEEDLFEFALDYKNFSRTDADYIKKWKLYSYGNRIRIFAAAKKNNVFAWEEVCLTSAYKELFNKYGINYQQGDIRALLCEQSDKAFYSSFMALMSLMLQMRNSITGRTDVDFLISPVKNSDGIFYDSRNYEAQENAILPKNADANGAYNIARKVLWAIGQFKKAEDEKLDKVKIAISNKEWLEYAQTSVK

SEQ ID NO: 27 - protein, 1307 aa, Unknown
  Acidaminococcus sp.
MTQFEGFTNLYQVSKTLRFELIPQGKTLKHIQEQGFIEEDKARNDHYKELKPIIDRIYKTYADQCLQLVQLDWENLSAAIDSYRKEKTEETRNALIEEQATYRNAIHDYFIGRTDNLTDAINKRHAEIYKGLFKAELFNGKVLKQLGTVTTTEHENALLRSFDKFTTYFSGFYENRKNVFSAEDISTAIPHRIVQDNFPKFKENCHIFTRLITAVPSLREHFENVKKAIGIFVSTSIEEVFSFPFYNQLLTQTQIDLYNQLLGGISREAGTEKIKGLNEVLNLAIQKNDETAHIIASLPHRFIPLFKQILSDRNTLSFILEEFKSDEEVIQSFCKYKTLLRNENVLETAEALFNELNSIDLTHIFISHKKLETISSALCDHWDTLRNALYERRISELTGKITKSAKEKVQRSLKHEDINLQEIISAAGKELSEAFKQKTSEILSHAHAALDQPLPTTLKKQEEKEILKSQLDSLLGLYHLLDWFAVDESNEVDPEFSARLTGIKLEMEPSLSFYNKARNYATKKPYSVEKFKLNFQMPTLASGWDVNKEKNNGAILFVKNGLYYLGIMPKQKGRYKALSFEPTEKTSEGFDKMYYDYFPDAAKMIPKCSTQLKAVTAHFQTHTTPILLSNNFIEPLEITKEIYDLNNPEKEPKKFQTAYAKKTGDQKGYREALCKWIDFTRDFLSKYTKTTSIDLSSLRPSSQYKDLGEYYAELNPLLYHISFQRIAEKEIMDAVETGKLYLFQIYNKDFAKGHHGKPNLHTLYWTGLFSPENLAKTSIKLNGQAELFYRPKSRMKRMAHRLGEKMLNKKLKDQKTPIPDTLYQELYDYVNHRLSHDLSDEARALLPNVITKEVSHEIIKDRRFTSDKFFFHVPITLNYQAANSPSKFNQRVNAYLKEHPETPIIGIDRGERNLIYITVIDSTGKILEQRSLNTIQQFDYQKKLDNREKERVAARQAWSVVGTIKDLKQGYLSQVIHEIVDLMIHYQAVVVLENLNFGFKSKRTGIAEKAVYQQFEKMLIDKLNCLVLKDYPAEKVGGVLNPYQLTDQFTSFAKMGTQSGFLFYVPAPYTSKIDPLTGFVDPFVWKTIKNHESRKHFLEGFDFLHYDVKTGDFILHFKMNRNLSFQRGLPGFMPAWDIVFEKNETQFDAKGTPFIAGKRIVPVIENHRFTGRYRDLYPANELIALLEEKGIVFRDGSNILPKLLENDDSHAIDTMVALIRSVLQMRNSNAATGEDYINSPVRDLNGVCFDSRFQNPEWPMDADANGAYHIALKGQLLLNHLKESKDLKLQNGISNQDWLAYIQELRN

SEQ ID NO: 28 - DNA, 28 bp, Leptotrichia shahii
ccaccccaatatcgaaggggactaaaac

SEQ ID NO: 29 - DNA, 36 bp, Leptotrichia wadei
gatttagactaccccaaaaacgaaggggactaaaac

SEQ ID NO: 30 - DNA, 36 bp, Listeria seeligeri
gtaagagactacctctatatgaaagaggactaaaac

SEQ ID NO: 31 - DNA, 35 bp, Unknown
  Lachnospiraceae bacterium
gtattgagaaaagccagatatagttggcaatagac

SEQ ID NO: 32 - DNA, 35 bp, Unknown
  Lachnospiraceae bacterium
gttgatgagaagagcccaagatagagggcaataac

SEQ ID NO: 33 - DNA, 35 bp, Clostridium aminophilum
gtctattgccctctatatcgggctgttctccaaac

SEQ ID NO: 34 - DNA, 36 bp, Carnobacterium gallinarum
attaaagactacctctaaatgtaagaggactataac

SEQ ID NO: 35 - DNA, 36 bp, Carnobacterium gallinarum
aatataaactacctctaaatgtaagaggactataac

SEQ ID NO: 36 - DNA, 36 bp, Paludibacter propionicigenes
cttgtggattatcccaaaattgaagggaactacaac

SEQ ID NO: 37 - DNA, 36 bp, Listeria weihenstephanensis
gatttagagtacctcaaaatagaagaggtctaaaac

SEQ ID NO: 38 - DNA, 36 bp, Listeria newyorkensis
gatttagagtacctcaaaacaaaagaggactaaaac

SEQ ID NO: 39 - DNA, 36 bp, Leptotrichia wadei
gatatagataaccccaaaaacgaagggatctaaaac

SEQ ID NO: 40 - DNA, 36 bp, Rhodobacter capsulatus
gcctcacatcaccgccaagacgacggcggactgaac

SEQ ID NO: 41 - DNA, 36 bp, Rhodobacter capsulatus; identical to SEQ ID NO: 40

SEQ ID NO: 42 - DNA, 36 bp, Rhodobacter capsulatus; identical to SEQ ID NO: 40

SEQ ID NO: 43 - protein, 1389 aa, Unknown
  Description of Unknown: Exemplary wild type Cas13a sequence
MGNLFGHKRWYEVRDKKDFKIKRKVKVKRNYDGNKYILNINENNNKEKIDNNKFIRKYINYKKNDNILKEFTRKFHAGNILFKLKGKEGIIRIENNDDFLETEEVVLYIEAYGKSEKLKALGITKKKIIDEAIRQGITKDDKKIEIKRQENEEEIEIDIRDEYTNKTLNDCSIILRIIENDELETKKSIYEIFKNINMSLYKIIEKIIENETEKVFENRYYEEHLREKLLKDDKIDVILTNFMEIREKIKSNLEILGFVKFYLNVGGDKKKSKNKKMLVEKILNINVDLTVEDIADFVIKELEFWNITKRIEKVKKVNNEFLEKRRNRTYIKSYVLLDKHEKFKIERENKKDKIVKFFVENIKNNSIKEKIEKILAEFKIDELIKKLEKELKKGNCDTEIFGIFKKHYKVNFDSKKFSKKSDEEKELYKIIYRYLKGRIEKILVNEQKVRLKKMEKIEIEKILNESILSEKILKRVKQYTLEHIMYLGKLRHNDIDMTTVNTDDFSRLHAKEELDLELITFFASTNMELNKIFSRENINNDENIDFFGGDREKNYVLDKKILNSKIKIIRDLDFIDNKNNITNNFIRKFTKIGTNERNRILHAISKERDLQGTQDDYNKVINIIQNLKISDEEVSKALNLDVVFKDKKNIITKINDIKISEENNNDIKYLPSFSKVLPEILNLYRNNPKNEPFDTIETEKIVLNALIYVNKELYKKLILEDDLEENESKNIFLQELKKTLGNIDEIDENIIENYYKNAQISASKGNNKAIKKYQKKVIECYIGYLRKNYEELFDFSDFKMNIQEIKKQIKDINDNKTYERITVKTSDKTIVINDDFEYIISIFALLNSNAVINKIRNRFFATSVWLNTSEYQNIIDILDEIMQLNTLRNECITENWNLNLEEFIQKMKEIEKDFDDFKIQTKKEIFNNYYEDIKNNILTEFKDDINGCDVLEKKLEKIVIFDDETKFEIDKKSNILQDEQRKLSNINKKDLKKKVDQYIKDKDQEIKSKILCRIIFNSDFLKKYKKEIDNLIEDMESENENKFQEIYYPKERKNELYIYKKNLFLNIGNPNFDKIYGLISNDIKMADAKFLFNIDGKNIRKNKISEIDAILKNLNDKLNGYSKEYKEKYIKKLKENDDFFAKNIQNKNYKSFEKDYNRVSEYKKIRDLVEFNYLNKIESYLIDINWKLAIQMARFERDMHYIVNGLRELGIIKLSGYNTGISRAYPKRNGSDGFYTTTAYYKFFDEESYKKFEKICYGFGIDLSENSEINKPENESIRNYISHFYIVRNPFADYSIAEQIDRVSNLLSYSTRYNNSTYASVFEVFKKDVNLDYDELKKKFKLIGNNDILERLMKPKKVSVLELESYNSDYIKNLIIELLTKIENTNDTL

SEQ ID NO: 44 - protein, 1224 aa, Bergeyella zoohelcum
MENKTSLGNNIYYNPFKPQDKSYFAGYFNAAMENTDSVFRELGKRLKGKEYTSENFFDAIFKENISLVEYERYVKLLSDYFPMARLLDKKEVPIKERKENFKKNFKGIIKAVRDLRNFYTHKEHGEVEITDEIFGVLDEMLKSTVLTVKKKKVKTDKTKEILKKSIEKQLDILCQKKLEYLRDTARKIEEKRRNQRERGEKELVAPFKYSDKRDDLIAAIYNDAFDVYIDKKKDSLKESSKAKYNTKSDPQQEEGDLKIPISKNGVVFLLSLFLTKQEIHAFKSKIAGFKATVIDEATVSEATVSHGKNSICFMATHEIFSHLAYKKLKRKVRTAEINYGEAENAEQLSVYAKETLMMQMLDELSKVPDVVYQNLSEDVQKTFIEDWNEYLKENNGDVGTMEEEQVIHPVIRKRYEDKFNYFAIRFLDEFAQFPTLRFQVHLGNYLHDSRPKENLISDRRIKEKITVFGRLSELEHKKALFIKNTETNEDREHYWEIFPNPNYDFPKENISVNDKDFPIAGSILDREKQPVAGKIGIKVKLLNQQYVSEVDKAVKAHQLKQRKASKPSIQNIIEEIVPINESNPKEAIVFGGQPTAYLSMNDIHSILYEFFDKWEKKKEKLEKKGEKELRKEIGKELEKKIVGKIQAQIQQIIDKDTNAKILKPYQDGNSTAIDKEKLIKDLKQEQNILQKLKDEQTVREKEYNDFIAYQDKNREINKVRDRNHKQYLKDNLKRKYPEAPARKEVLYYREKGKVAVWLANDIKRFMPTDFKNEWKGEQHSLLQKSLAYYEQCKEELKNLLPEKVFQHLPFKLGGYFQQKYLYQFYTCYLDKRLEYISGLVQQAENFKSENKVFKKVENECFKFLKKQNYTHKELDARVQSILGYPIFLERGFMDEKPTIIKGKTFKGNEALFADWFRYYKEYQNFQTFYDTENYPLVELEKKQADRKRKTKIYQQKKNDVFTLLMAKHIFKSVFKQDSIDQFSLEDLYQSREERLGNQERARQTGERNTNYIWNKTVDLKLCDGKITVENVKLKNVGDFIKYEYDQRVQAFLKYEENIEWQAFLIKESKEEENYPYVVEREIEQYEKVRREELLKEVHLIEEYILEKVKDKEILKKGDNQNFKYYILNGLLKQLKNEDVESYKVFNLNTEPEDVNINQLKQEATDLEQKAFVLTYIRNKFAHNQLPKKEFWDYCQEKYGKIEKEKTYAEYFAEVFKKEKEALIK

SEQ ID NO: 45 - protein, 964 aa, Ruminococcus flavefaciens
IEKKKSFAKGMGVKSTLVSGSKVYMTTFAEGSDARLEKIVEGDSIRSVNEGEAFSAEMADKNAGYKIGNAKFSHPKGYAVVANNPLYTGPVQQDMLGLKETLEKRYFGESADGNDNICIQVIHNILDIEKILAEYITNAAYAVNNISGLDKDIIGFGKFSTVYTYDEFKDPEHHRAAFNNNDKLINAIKAQYDEFDNFLDNPRLGYFGQAFFSKEGRNYIINYGNECYDILALLSGLAHWVVANNEEESRISRTWLYNLDKNLDNEYISTLNYLYDRITNELTNSFSKNSAANVNYIAETLGINPAEFAEQYFRFSIMKEQKNLGFNITKLREVMLDRKDMSEIRKNHKVFDSIRTKVYTMMDFVIYRYYIEEDAKVAAANKSLPDNEKSLSEKDIFVINLRGSFNDDQKDALYYDEANRIWRKLENIMHNIKEFRGNKTREYKKKDAPRLPRILPAGRDVSAFSKLMYALTMFLDGKEINDLLTTLINKFDNIQSFLKVMPLIGVNAKFVEEYAFFKDSAKIADELRLIKSFARMGEPIADARRAMYIDAIRILGTNLSYDELKALADTFSLDENGNKLKKGKHGMRNFIINNVISNKRFHYLIRYGDPAHLHEIAKNEAVVKFVLGRIADIQKKQGQNGKNQIDRYYETCIGKDKGKSVSEKVDALTKIITGMNYDQFDKKRSVIEDTGRENAEREKFKKIISLYLTVIYHILKNIVNINARYVIGFHCVERDAQLYKEKGYDINLKKLEEKGFSSVTKLCAGIDETAPDKRKDVEKEMAERAKESIDSLESANPKLYANYIKYSDEKKAEEFTRQINREKAKTALNAYLRNTKWNVIIREDLLRIDNKTCTLFANKAVALEVARYVHAYINDIAEVNSYFQLYHYIMQRIIMNERYEKSSGKVSEYFDAVNDEKKYNDRLLKLLCVPFGYCIPRFKNLSIEALFDRNEAAKFDKEKKSGNS

SEQ ID NO: 46 - protein, 1034 aa, Unknown
  Description of Unknown: Cas13d (contig e-k87_11092736) sequence
MKRQKTFAKRIGIKSTVAYGQGKYAITTFGKGSKAEIAVRSADPPEETLPTESDATLSIHAKFAKAGRDGREFKCGDVDETRIHTSRSEYESLISNPAESPREDYLGLKGTLERKFFGDEYPKDNLRIQIIYSILDIQKILGLYVEDILHFVDGLQDEPEDLVGLGLGDEKMQKLLSKALPYMGFFGSTDVFKVTKKREERAAADEHNAKVFRALGAIRQKLAHFKWKESLAIFGANANMPIRFFQGATGGRQLWNDVIAPLWKKRIERVRKSFLSNSAKNLWVLYQVFKDDTDEKKKARARQYYHFSVLKEGKNLGFNLTKTREYFLDKFFPIFHSSAPDVKRKVDTFRSKFYAILDFIIYEASVSVANSGQMGKVAPWKGAIDNALVKLREAPDEEAKEKIYNVLAASIRNDSLFLRLKSACDKFGAEQNRPVFPNELRNNRDIRNVRSEWLEATQDVDAAAFVQLIAFLCNFLEGKEINELVTALIKKFEGIQALIDLLRNLEGVDSIRFENEFALFNDDKGNMAGRIARQLRLLASVGKMKPDMTDAKRVLYKSALEILGAPPDEVSDEWLAENILLDKSNNDYQKAKKTVNPFRNYIAKNVITSRSFYYLVRYAKPTAVRKLMSNPKIVRYVLKRLPEKQVASYYSAIWTQSESNSNEMVKLIEMIDRLTTEIAGFSFAVLKDKKDSIVSASRESRAVNLEVERLKKLTTLYMSIAYIAVKSLVKVNARYFIAYSALERDLYFFNEKYGEEFRLHFIPYELNGKTCQFEYLAILKYYLARDEETLKRKCEICEEIKVGCEKHKKNANPPYEYDQEWIDKKKALNSERKACERRLHFSTHWAQYATKRDENMAKHPQKWYDILASHYDELLALQATGWLATQARNDAEHLNPVNEFDVYIEDLRRYPEGTPKNKDYHIGSYFEIYHYIRQRAYLEEVLAKRKEYRDSGSFTDEQLDKLQKILDDIRARGSYDKNLLKLEYLPFAYNLPRYKNLTTEALFDDDSVSGKKRVAEWREREKTREAEREQRRQR

SEQ ID NO: 47 - DNA, 30 bp, Unknown
  Description of Unknown: Cas13d (contig e-k87_11092736) DR sequence
gtgagaagtctccttatggggagatgctac

SEQ ID NO: 48 - protein, 1022 aa, Unknown
  Description of Unknown: Cas13d(160582958_gene49834) sequence
MKNSVTFKLIQAQENKEAARKKAKDIAEQARIAKRNGVVKKEENRINRIQIEIQTQKKSNTQNAYHLKSLAKAAGVKSVFAIGNDLLMTGFGPGNDATIEKRVFQNRAIETLSSPEQYSAEFQNKQFKIKGNIKVLNHSTQKMEEIQTELQDNYNRPHFDLLGCKNVLEQKYFGRTFSDNIHVQIAYNIMDIEKLLTPYINNIIYTLNELMRDNSKDDFFGCDSHFSVAYLYDELKAGYSDRLKTKPNLSKNIDRIWNNFCNYMNSDSGNTEARLAYFGELFYKPKETGDAKSDYKTHLSNNQKEEWELKSDKEVYNIFAILCDLRHFCTHGESITPSGKPFPYNLEKNLFPEAKQVLNSLFEEKAESLGAEAFGKTAGKTDVSILLKVFEKEQASQKEQQALLKEYYDFKVQKTYKNMGFSIKKLREAIMEIPDAAKFKDDLYSSLRHKLYGLFDFILVKHFLDTSDSENLQNNDIFRQLRACRCEEEKDQVYRSIAVKVWEKVKKKELNMFKQVVVIPSLSKDELKQMEMTKNTELLSSIETISTQASLFSEMIFMMTYLLDGKEINLLCTSLIEKFENIASFNEVLKSPQIGYETKYTEGYAFFKNADKTAKELRQVNNMARMTKPLGGVNTKCVMYNEAAKILGAKPMSKAELESVFNLDNHDYTYSPSGKKIPNKNFRNFIINNVITSRRFLYLIRYGNPEKIRKIAINPSIISFVLKQIPDEQIKRYYPPCIGKRTDDVTLMRDELGKMLQSVNFEQFSRVNNKQNAKQNPNGEKARLQACVRLYLTVPYLFIKNMVNINARYVLAFHCLERDHALCFNSRKLNDDSYNEMANKFQMVRKAKKEQYEKEYKCKKQETGTAHTKKIEKLNQQIAYIDKDIKNMHSYTCRNYRNLVAHLNVVSKLQNYVSELPNDYQITSYFSFYHYCMQLGLMEKVSSKNIPLVESLKNEANDAQSYSAKKTLEYFDLIEKNRTYCKDFLKALNAPFSYNLPRFKNLSIEALFDKNIVYEQADLKKE

SEQ ID NO: 49 - DNA, 36 bp, Unknown
  Description of Unknown: Cas13d(160582958_gene49834)DR sequence
gaactacacccctctgttcttgtaggggtctaacac

SEQ ID NO: 50 - protein, 877 aa, Unknown
  Description of Unknown: Sheep gut metagenome sequence
MKKQKSKKTVSKTSGLKEALSVQGTVIMTSFGKGNMANLSYKIPSSQKPQNLNSSAGLKNVEVSGKKIKFQGRHPKIATTDNPLFKPQPGMDLLCLKDKLEMHYFGKTFDDNIHIQLIYQILDIEKILAVHVNNIVFTLDNVLHPQKEELTEDFIGAGGWRINLDYQTLRGQTNKYDRFKNYIKRKELLYFGEAFYHENERRYEEDIFAILTLLSALRQFCFHSDLSSDESDHVNSFWLYQLEDQLSDEFKETLSILWEEVTERIDSEFLKTNTVNLHILCHVFPKESKETIVRAYYEFLIKKSFKNMGFSIKKLREIMLEQSDLKSFKEDKYNSVRAKLYKLFDFIITYYYDHHAFEKEALVSSLRSSLTEENKEEIYIKTARTLASALGADFKKAAADVNAKNIRDYQKKANDYRISFEDIKIGNTGIGYFSELIYMLTLLLDGKEINDLLTTLINKFDNIISFIDILKKLNLEFKFKPEYADFFNMTNCRYTLEELRVINSIARMQKPSADARKIMYRDALRILGMDNRPDEEIDRELERTMPVGADGKFIKGKQGFRNFIASNVIESSRFHYLVRYNNPHKTRTLVKNPNVVKFVLEGIPETQIKRYFDVCKGQEIPPTSDKSAQIDVLARIISSVDYKIFEDVPQSAKINKDDPSRNFSDALKKQRYQAIVSLYLTVMYLITKNLVYVNSRYVIAFHCLERDAFLHGVTLPKMNKKIVYSQLTTHLLTDKNYTTYGHLKNQKGHRKWYVLVKNNLQNSDITAVSSFRNIVAHISVVRNSNEYISGIGELHSYFELYHYLVQSMIAKNNWYDTSHQPKTAEYLNNLKKHHTYCKDFVKAYCIPFGYVVPRYKNLTINELFDRNNPNPEPKEEV

SEQ ID NO: 51 - DNA, 36 bp, Unknown
  Description of Unknown: Sheep gut metagenome sequence
caactacaaccccgtaaaaatacggggttctgaaac

SEQ ID NO: 52 - DNA, 10188 bp, Homo sapiens
gagtattgcctttggcccccacccccacgggtccccgcgctccgtcttccttctgactgggggactccgcgggacggcgttcccggcgcgcactgtaccccttgccgccccttccccttcatgttggacctgacctcccgcggacaagtggggacgtcccggaggatggccgaggcggcgtgtagcgcacactttctggaaaccacccctactcctaatcccccgactacagaagaggagaaaacggaatctaatcaggaggttgctaacccagaacactatattaaacatcccctacagaacagatgggcactctggttttttaaaaatgataaaagcaaaacttggcaagcaaacctgcggctgatctccaagtttgatactgttgaagacttttgggctctgtacaaccatatccagttgtctagtaatttaatgcctggctgtgactactcactttttaaggatggtattgagcctatgtgggaagatgagaaaaacaaacggggaggacgatggctaattacattgaacaaacagcagagacgaagtgacctcgatcgcttttggctagagacacttctgtgccttattggagaatcttttgatgactacagtgatgatgtatgtggcgctgttgttaatgttagagctaaaggtgataagatagcaatatggactactgaatgtgaaaacagagaagctgttacacatatagggagggtatacaaggaaaggttaggacttcctccaaagatagtgattggttatcagtcccacgcagacacagctactaagagcggctccaccactaaaaataggtttgttgtttaagaagacaccttctgagtattctcataggagactgcgtcaagcaatcgagatttgggagctgaaccaaagcctcttcaaaaagcagagtggactgcatttaaatttgatttccatcttaatgttactcagatataagagaagtctcattcgcctttgtcttgtacttctgtgttcatttttttttttttttttggctagagtttccactatcccaatcaaagaattacagtacacatccccagaatccataaatgtgttcctggcccactctgtaatagttcagtagaattaccattaattacatacagattttacctatccacaatagtcagaaaacaacttggcatttctatactttacaggaaaaaaaattctgttgttccattttatgcagaagcatattttgctggtttgaaagattatgatgcatacagttttctagcaattttctttgtttctttttacagcattgtctttgctgtactcttgctgatggctgctagattttaatttatttgtttccctacttgataatattagtgattctgatttcagtttttcatttgttttgcttttgtttttttcctcatgtaacattggtgaaggatccaggaatatgacacaaaggtggaataaacattaattttgtgcattctttggtaattttttttgttttttgtaactacaaagctttgctacaaatttatgcatttcattcaaatcagtgatctatgtttgtgtgatttcctaaacataattgtggattataaaaaatgtaacatcataattacattcctaactagaattagtatgtctgtttttgtatctttatgctgtattttaacactttgtattacttaggttattttgctttggttaaaaatggctcaagtagaaaagcagtcccattcatattaagacagtgtacaaaactgtaaataaaatgtgtacagtgaattgtcttttagacaactagatttgtccttttatttctccatctttatagaaggaatttgtacttcttattgcaaggcagtctctatattatgtcttcttttgtggtgtcttccatgtgaacagcataagtttggagcactagtttgattattatgtttattacaatttttaataaattgaataggtagtatcatatatatggaattaaattgatgtggctatctttgtttttttataaagtaaggcacagtcattcagtcttaggtaaataatgtactctcttaatatgttaatactcatgagaattgggatctgatgcatcaccatttgattggtagcaacagtggttgtaaaacttggttgctgaattgagttgtttctatgttaagtgtcaaaatgatagtgtagggaaagtacaggtggtggggacatatgcattaagaatcttgttagtgttgcaatctaaatagaatggaataaacaggtgttaagacatatttatagtggtaaattgttgtagtatggtattctgtaaacttgaaaacttgatctactctttgtaggtatcatttgaaagcaaacttgaaaatgttttgtacatagtacatacttgtatagtcctgtgagatgaagtatggctatcagaccaaaggataagccaaactgtaggtagcagaatggaaattattattttgagaggaaaatttgtctttgaatggtgattatgacttaatcattttaaaactgataaacttgacaaaaaccctgtatgaaataaacatgaaattaatagcactgatttcattgtaaaattttaaagcagtttaaagggtaccacaggttatcacagtactctcaatgccacaaacacctcttgttcagtattctagaaatactgaatcagaattctgtgtttattataatctcagcatactgtacataatatctgctagttaaacttgggtaattggttaaggtgacttactgtctatgtcaatatgtatagttttgagtacttcaagagtttacttaaaagtgatgatgttactggtatgttggcagtgggtgggactgaagtagtgtatctattataaattgatctattttcttaattctaagatgaagtccaattttaagcatcagcttttaggtgcaaaggaggaattaacacattaaatgtatacagttctaaatttttgaaataactgatgtgtagcatttgattattggtattaccattttagaatcatgatgttattttaaacctttttcctggggacaagaaaggataataaattacgctgaatcacttttggcagttgccacttaaatagtacagtgacttgcaacttttataactttatcagcatcttctctaaatacaaaattaggctatatgttattttccaacttactgttttctctctgtttagcaggatattataaatagattaaatagatatattttctttttttttttttttttttgagacggagtctcgctttgtctcccaggctggagtgcagtggcgtgatctcccagtagctgggactacaagcacctgccaccatgcccggctaattttttttgtatttttagtagagacggggtttcactgtgttagccaagatggtctcaatctcctgactttgtgatctgcctgcttctgcctcccaaagtgctgggattacaggtgtgagccaccgtacccagcccaaatagatgtattttcataatagagaattgaaataggctttaatgggtgaatagcagtttattgtaggcatgtgacatttcatttaatgaatttaaagtttattatcccaattctacagaaggatttaatgcatactatgcaattaaataattataacactacatagtaataatttatgtgccaggcagtagttcagtcactttacatgcttattaacctgcagaataatcttttgagatgtaggtgctgttactgagaatttaacttttgcttgtaaattgcaaagggtggatttgaattctggaaatttggttccagagacaataattacataacactttctccatagggtacagcctgtctaataggctatagtaaatcacctcagcttgttataggtcgggcatgcaaacatttctccattttactccctttggtaatgaatctagtaatagatggaaattttccctagattcactgtgttagtcagttggggaagtttggaggcaaagatacaggagtttatggggaggtagtgtacataaatataatcatatgctatataaggaagttttggtcagcagcagaccatatataggatggtgggccagtaacattgtaacactgtatttttactgtatcttttccatgttttgttatgtttagatacacaaataacattatggagtattcagtatggtaacatgccatacaggtttgtagcctaggagcagtaatagactgttccctgaaacctatatttgtggtaggtttataccattcaggtttgtgtaagtacacaacgaaatcatctaatggcccatttctcaaaacatattcccatcattaatcaatgcatggtcatgttttcgtatacattttaagcttctgtattctaatctaatataaatggcaaaatattcaaactgataggcattgagattcttaaatgctaaagttgcattcaaaaggataattttaggcgttgtgacaaagcagtgttatattttaaagttagtgacaaggctatgcaccttttatctctaattgtttcttacagaatgtttttattattgagtagtaaaacaataaatgtcagatcctttatacaaattcaagattgacattgataaacaaaacttcagcatatcactcaaggtcagcgtagaaattgtgtgtctggaaacttctatagtaattttatattactgtgacattagtatgtgatcacttttctagtaatgttttaaaaaaatatatcttacaggccaggcatagtgctttatgcctgtaatcccagcactttgggaggccaaggtggcaggattgcatgagtccaggagttcaacaccagtctgggcaataaagtgagaccccatcgctacaaacaaattaaaaaatatttatgtatgtgtgtaatatatataatatataacaaaacacatatgtatgtgtatatatagtatgtctggcagagtacaatttaggggttaagactggtccctcacatatggtgtgagaaacactgttcacaggttgctttccccattagcccagggcaactcatttgcccatcatttcctagaacaaccgggtctgttacgtctacagttttcatcttcatgcagttatggatttggtgtcaaaaactttggtcctgttctctaccatcttaaaataaactcttgtgtcctgctttactatgaattgcaaagtaggcattaggtagccttcctactaccatagtttagagttcaatattcttatgaccattctactggtagaagcaaaaaatgaacttgtaggcatgtgatcacatgtgcctatggtgctgtcttttccagtacaggggaactaattttcatattttaatcttgcagctttttgtttacttcatgcattgtgatttctcatagttttgcacagaactcacttccctaccttttctgaaacaaaagtatgtatacacacatacatatgtattgagcacctctatttactgtgttccacgtgctgggcatatagcaagaacagaatggtctggggccctgctctaaagaagatttaaaagcaaacatatattaaaaatgcgtgagtctggccaggagcagtggctcatgcctgcaaccccagcactttgggaggctgaagcgggtgaatcacctgagatcaggagttgagaccagcctggccaacatggtgaaaccccgtctctactaaaaatacaaaaattagcctggcatggtggcatgcgcctgtaattccagctactttggagactgagacaggagaatcacttgagcccaggaagtggaggttgcagtgagctgagatcgcgccactgcactccagcctgggtgacagagcaagactccatctcaaaaaaaaaaaaaaaacgtgtctgttcataaggttctacaaatagctgttgttacagaaaataggactagggttttattactggggattatgcagtcgaggtaaatataaaatgaggttgtttcttcttttttttatttgagacagagtcttgtttgccaggctggagtgcagtggcgtgctcttagctccgcctcccgggatcaaacgattctcttgcctcagcctctcgagtagctgggactacaggcgcgtgccaccacacccagctgatttttgtatttttagtagagatgggatttcaccatgatggccaggatggtctcgatcttttgacctcatgatccacccacctcggcctcccaaagtgctgggattacaggcgtgagccactgcacccggccctggttctaaatactcttccagctctaaaacattgattctaaacagatcacattccaggaggactctagcaaaccagcatatgcaaattatagcttttgcaagaccgtttctacttttatattactgaactctatatgattgtccaagtaaagttttgtgtctctttgattatttgattgtactttaaaattttttcaccattcatttaacattttttaccatactgtagtatttttaatgcaattgtgtttgcattggtgtggctttagaggcttctccaaccaccttcccaaaatactgatctgtgatttttttctttaatgtttggccaaacataatacatgcttattttatttttcatccctacagaaaggtagaagatgagaattctgtctcctactgttgtttttcaaggtgccactcaaatttcttgtacgtgtctagaaacttgtgcatacaatagaagtacactgtggctgggcatggtggctcatgcctgtaatcccagcactttgtgaagctgaggtgggtggatcacctgaggtcagggagtttgagaccagcctggccaacatgatgaaaccccgtctttactaaaattagaaaaaattagccaggcgtggtggtgtgcgcctgtaatcccagctactcgggaggctgaggcatgagaatcacttgaactcgggtggcagaggctgcagtgagctgagatcatgccactgcattccagcctgcgcagctgagccagactccatctccaaaaaaaaaaaaaaaaaaaaaaaaagatgtccaatatatgtaacttttttctttggacacaaaaattccattagctttgttttctcatttttacttgtcatgatgtatgtcgaacacattatttttagtgtctggtgttccattatacagatgtctctcttgttggttgaatttttgcattcacagaccctcaagttggattcatatctttttacactaagcataaagaagacggattggggtcgggtatggtggctcacgcctgtaatcccagcacttcgggaggctgaggtgggcggatcacgaggtcaggagttcgagaccagcctggccaacatactgaaaccccgtctctaaaaatatgaaaaaaaaattagccaggcgtggtggtgcgcagctgtagccccagctacttgggaggctgaggcaggagaatcacttgaacccaggaggtggaggttgcagtgagcatattgcaccattgcattccagcctgcacgacagaggaagacgccatttcaaaaaaaaaaaaaaaaagacggattgattttcttcagcagtatcaagtggcacttaccatccacccctttaacacccaaaccattctaatccatgtatacagaccatcatctgtttcgttattgtgttctataatgcagctttgcgagttatgcagttttggtcctcatgatatttttctgattggtttttaatgtattttgttctaacgagccaacattgttatacatgtaatttgtttatttgctagattgtactctttcccaaagatgggctatgaactagcatctactttcattttacctatttacctgtaaacattgaaaaaactgaatcaaatgcagtgatatcggacctagttttattgttatgccttataatgaatttaacttcacagttttctaaatgagagcatttcccaaagacatctttatggtcataaccagtttcccttggcatttgatttatttttatttttatttatttatctttttgagaaggagtttcgctcttgttgcccaggctagagtgcaatggcgtgatctcgggtcactgcaacctctgcctcccgggttcaagcgattctcctgcctcagcctccaagtagctgggattacaggcatgcaccaccacgcccgactaatttgtatttttagagacggggtttctccgtgttggtcaggctggtctcaaacttccaacctcaggtgatccgcccgccgtggcctcccaaagtgttgggattacaggcgtgagccacagtgtctggcctgatttgtttttaagagcattatttttctgctttattttgtgacttcaacatttgacacaattttgggtgaatggtttgtgcatggtgcctgacatcgtgttttgatgtgtagtatatgccataggacatgtgagacaagatatgtcccaacttgaccttgttttgtattgtttatgtcaaggtgttgagtgtattagatatactgttggggctctgtgttctagctctgccttttagataataaccatggttaaatattgcaatgtcctgcatgtctccacacatgggttttgtaactgagtcagaatgataagtgattagtaagcacattttttctcctttcaggaaaccactattttccttttctacatgctgttttgtaagtagtacttttatgaaggttgtcttcaaatgttcgcatcttccatttctactgcccttgggttatccatcctgtcattttgtgccaatcacttttttttttaacttttaagttcagggatgaaagtgtagatttgttacataggtaaacttgtgtcatggggttgttgtacagattatttcatcacccaggtgttaagcctagtatgcactagttgtttttcctgatcctctccctgctcccaccctccaccctctgataggccccagtgtgtgttgttcccctctgtgtgtccatgtgttctcatcatttagctcccacttacaagtgagaatgtggtgtttggttttctgttcctgcattagtttgctaaggataatggcctcgagctccatccaagtccctgtaaaggacatgatcttgtacttttttatggctgcatagtattctgtggtgtatatgtaccacattttctttatccagtctatcattaggcatttaggttgattccatgtttttgctattgtgaatagtgctgcaatgaacatacatgtgcatgtctttttataatagaatgatttatattctgttgtgtatatacccagtaatgggattgctgagttgaatgctatttctgcctttaggtctttgatgaattgccacactgtcttccacaatggttgaactaatttacactcccaccaacggtgaataagtgttcacttttctccacaaccttgtcagcatctattattttttgactttttagtaatagccattctgactgctcacatctattttgtaaataaagttttattgaaacatggccttacccatttgtttacatatattcatggctgtttttgtgccacaatgtcagagttgtcttaaagtagacagagactatctggctgtaaagcctgagatatatactaactggttctttatgtaaaaagtttgctgaccacctactctaaacgttttgcagtgatggtagtgttggcaaaaaaccaaatagcttaccctctttaaatttcccttttacttcttacaaactcctaacaccatttacgactttgtcatcaatatggtcaactaagcttggtttgcatggctctacttcctttcaccttccacttaggcagtgtctccaagtccactgcagtttctatttgtctcctgactgttactgtatcagttcttacctaaataacataacaactgatctccctactttttgcctatgccctcaaatgtgctcattgttgatctatctccctgttaggtgttctttttctcctctttagaaagcagccaaggaaaccagggttctctcaaagtggaaaatactggaacttatgtactgttatcataatgatagttggtgttttgaattataagaatgattccaggtggtttctaaatcatccaataaagctgtattcactctgtaaaaaaaaaaa

SEQ ID NO: 53 - DNA, 11626 bp, Homo sapiens
aggcacaggcagcctgcatacactccttttcctggtgtcaacattatttaaaagcatgggaaatagtaatgagacagtgtcttcttcattagaaccttaggagtctactagatttcttcatctctatttgttgttattagtagccaaactgtgcaaaaaacacggtcttgagaaatgacagcacagtatcttagagggaaaggaaatgtaggatgccagtgtggggacaaatttctgattgccagtgattgttgtgagcataacaataatttcatgaacattaaagcctctattgagggcagctgcagttgtaaaggaaaaaaaatggtcctgaacatttaaaactacactggtgtacatcataatcaaacaaagtaaacagaaaaaaatttaaactttgctaaaaaaaaaaagcagaagcacttgatctttaggaaggcacgcagttgcttattatgaatcatttctagagtccgatgcattttcaaagccggttacagtcattacgaagcacacccttgtgaggtaagtgtatcatcacctttggttcataaataaaaaagctgagacgccgagcgattaagtcactcgcctaaggagaatgagtcaacgtcaagagtcatagttgacccggcctaaagactccagaccatcagtccagggcttagtcagcggggcccggagtggcttccctggctggcatctggacttaggctatttccgtgcacgtaaaagcggaatattggaacggttgcacagaacttccaaataatttttaccgccacgcaagatttagccctgaggtcttaatctcaggatttgggacagtaaaagctgtcgtccctccccctcgtccagccggtggcaagcgggtactgcgggcggttccgtccgtcccctttcgcagaaatggcaacgaatgaccaccagcattagctgagccaggggacgtgggagggttgattgcctaaacgactctgcatcgccgcctctttttgaaactaagagaaaatggtgggagatcaaaagaaaactaaataaacacacaggcaacttgtcctgggacctcaactaagcaaatgaagccttattgtgtgtgctgagcctgcagttcccaaccttccggggaagatgggaggacagggcgacaaagggcacagtaggcttgcctggcagtaagtgtgaccgcagctatccaggcggaagagcagaggactgaaaccaccctccagcaagcgagtgtccgccgcgttgagaaccgcgcaccctacccatcggccacgtgaccagtcctttttaaaaaaaatttctttaccttaaaaaaaaaaaaaaaaaaaaggtgggggagagactccacttcccagaagcctctcgttactcacgcagccgcagtcttgcgcaggtgccgccagggccaaacggacatatccgtcacgtggccagaagctggccaatccggtttgaatctcatttttttcctcttacccccccttctggagcggttgtgcgatcagatcgatctaagatggcgactgtcgaaccggaaaccacccctactcctaatcccccgactacagaagaggagaaaacggaatctaatcaggaggttgctaacccagaacactatattaaacatcccctacagaacagatgggcactctggttttttaaaaatgataaaagcaaaacttggcaagcaaacctgcggctgatctccaagtttgatactgttgaagacttttgggctctgtacaaccatatccagttgtctagtaatttaatgcctggctgtgactactcactttttaaggatggtattgagcctatgtgggaagatgagaaaaacaaacggggaggacgatggctaattacattgaacaaacagcagagacgaagtgacctcgatcgcttttggctagagacaagatgggatcttgctatgttgcccaggttggtctcaaacttctggcctcaagtgatcctcccacttcagcctcccaaagtgctggaattacagcttctgtgccttattggagaatcttttgatgactacagtgatgatgtatgtggcgctgttgttaatgttagagctaaaggtgataagatagcaatatggactactgaatgtgaaaacagagaagctgttacacatatagggagggtatacaaggaaaggttaggacttcctccaaagatagtgattggttatcagtcccacgcagacacagctactaagagcggctccaccactaaaaataggtttgttgtttaagaagacaccttctgagtattctcataggagactgcgtcaagcaatcgagatttgggagctgaaccaaagcctcttcaaaaagcagagtggactgcatttaaatttgatttccatcttaatgttactcagatataagagaagtctcattcgcctttgtcttgtacttctgtgttcatttttttttttttttttggctagagtttccactatcccaatcaaagaattacagtacacatccccagaatccataaatgtgttcctggcccactctgtaatagttcagtagaattaccattaattacatacagattttacctatccacaatagtcagaaaacaacttggcatttctatactttacaggaaaaaaaattctgttgttccattttatgcagaagcatattttgctggtttgaaagattatgatgcatacagttttctagcaattttctttgtttctttttacagcattgtctttgctgtactcttgctgatggctgctagattttaatttatttgtttccctacttgataatattagtgattctgatttcagtttttcatttgttttgcttttgtttttttcctcatgtaacattggtgaaggatccaggaatatgacacaaaggtggaataaacattaattttgtgcattctttggtaattttttttgttttttgtaactacaaagctttgctacaaatttatgcatttcattcaaatcagtgatctatgtttgtgtgatttcctaaacataattgtggattataaaaaatgtaacatcataattacattcctaactagaattagtatgtctgtttttgtatctttatgctgtattttaacactttgtattacttaggttattttgctttggttaaaaatggctcaagtagaaaagcagtcccattcatattaagacagtgtacaaaactgtaaataaaatgtgtacagtgaattgtcttttagacaactagatttgtccttttatttctccatctttatagaaggaatttgtacttcttattgcaaggcagtctctatattatgtcttcttttgtggtgtcttccatgtgaacagcataagtttggagcactagtttgattattatgtttattacaatttttaataaattgaataggtagtatcatatatatggaattaaattgatgtggctatctttgtttttttataaagtaaggcacagtcattcagtcttaggtaaataatgtactctcttaatatgttaatactcatgagaattgggatctgatgcatcaccatttgattggtagcaacagtggttgtaaaacttggttgctgaattgagttgtttctatgttaagtgtcaaaatgatagtgtagggaaagtacaggtggtggggacatatgcattaagaatcttgttagtgttgcaatctaaatagaatggaataaacaggtgttaagacatatttatagtggtaaattgttgtagtatggtattctgtaaacttgaaaacttgatctactctttgtaggtatcatttgaaagcaaacttgaaaatgttttgtacatagtacatacttgtatagtcctgtgagatgaagtatggctatcagaccaaaggataagccaaactgtaggtagcagaatggaaattattattttgagaggaaaatttgtctttgaatggtgattatgacttaatcattttaaaactgataaacttgacaaaaaccctgtatgaaataaacatgaaattaatagcactgatttcattgtaaaattttaaagcagtttaaagggtaccacaggttatcacagtactctcaatgccacaaacacctcttgttcagtattctagaaatactgaatcagaattctgtgtttattataatctcagcatactgtacataatatctgctagttaaacttgggtaattggttaaggtgacttactgtctatgtcaatatgtatagttttgagtacttcaagagtttacttaaaagtgatgatgttactggtatgttggcagtgggtgggactgaagtagtgtatctattataaattgatctattttcttaattctaagatgaagtccaattttaagcatcagcttttaggtgcaaaggaggaattaacacattaaatgtatacagttctaaatttttgaaataactgatgtgtagcatttgattattggtattaccattttagaatcatgatgttattttaaacctttttcctggggacaagaaaggataataaattacgctgaatcacttttggcagttgccacttaaatagtacagtgacttgcaacttttataactttatcagcatcttctctaaatacaaaattaggctatatgttattttccaacttactgttttctctctgtttagcaggatattataaatagattaaatagatatattttctttttttttttttttttttgagacggagtctcgctttgtctcccaggctggagtgcagtggcgtgatctcccagtagctgggactacaagcacctgccaccatgcccggctaattttttttgtatttttagtagagacggggtttcactgtgttagccaagatggtctcaatctcctgactttgtgatctgcctgcttctgcctcccaaagtgctgggattacaggtgtgagccaccgtacccagcccaaatagatgtattttcataatagagaattgaaataggctttaatgggtgaatagcagtttattgtaggcatgtgacatttcatttaatgaatttaaagtttattatcccaattctacagaaggatttaatgcatactatgcaattaaataattataacactacatagtaataatttatgtgccaggcagtagttcagtcactttacatgcttattaacctgcagaataatcttttgagatgtaggtgctgttactgagaatttaacttttgcttgtaaattgcaaagggtggatttgaattctggaaatttggttccagagacaataattacataacactttctccatagggtacagcctgtctaataggctatagtaaatcacctcagcttgttataggtcgggcatgcaaacatttctccattttactccctttggtaatgaatctagtaatagatggaaattttccctagattcactgtgttagtcagttggggaagtttggaggcaaagatacaggagtttatggggaggtagtgtacataaatataatcatatgctatataaggaagttttggtcagcagcagaccatatataggatggtgggccagtaacattgtaacactgtatttttactgtatcttttccatgttttgttatgtttagatacacaaataacattatggagtattcagtatggtaacatgccatacaggtttgtagcctaggagcagtaatagactgttccctgaaacctatatttgtggtaggtttataccattcaggtttgtgtaagtacacaacgaaatcatctaatggcccatttctcaaaacatattcccatcattaatcaatgcatggtcatgttttcgtatacattttaagcttctgtattctaatctaatataaatggcaaaatattcaaactgataggcattgagattcttaaatgctaaagttgcattcaaaaggataattttaggcgttgtgacaaagcagtgttatattttaaagttagtgacaaggctatgcaccttttatctctaattgtttcttacagaatgtttttattattgagtagtaaaacaataaatgtcagatcctttatacaaattcaagattgacattgataaacaaaacttcagcatatcactcaaggtcagcgtagaaattgtgtgtctggaaacttctatagtaattttatattactgtgacattagtatgtgatcacttttctagtaatgttttaaaaaaatatatcttacaggccaggcatagtgctttatgcctgtaatcccagcactttgggaggccaaggtggcaggattgcatgagtccaggagttcaacaccagtctgggcaataaagtgagaccccatcgctacaaacaaattaaaaaatatttatgtatgtgtgtaatatatataatatataacaaaacacatatgtatgtgtatatatagtatgtctggcagagtacaatttaggggttaagactggtccctcacatatggtgtgagaaacactgttcacaggttgctttccccattagcccagggcaactcatttgcccatcatttcctagaacaaccgggtctgttacgtctacagttttcatcttcatgcagttatggatttggtgtcaaaaactttggtcctgttctctaccatcttaaaataaactcttgtgtcctgctttactatgaattgcaaagtaggcattaggtagccttcctactaccatagtttagagttcaatattcttatgaccattctactggtagaagcaaaaaatgaacttgtaggcatgtgatcacatgtgcctatggtgctgtcttttccagtacaggggaactaattttcatattttaatcttgcagctttttgtttacttcatgcattgtgatttctcatagttttgcacagaactcacttccctaccttttctgaaacaaaagtatgtatacacacatacatatgtattgagcacctctatttactgtgttccacgtgctgggcatatagcaagaacagaatggtctggggccctgctctaaagaagatttaaaagcaaacatatattaaaaatgcgtgagtctggccaggagcagtggctcatgcctgcaaccccagcactttgggaggctgaagcgggtgaatcacctgagatcaggagttgagaccagcctggccaacatggtgaaaccccgtctctactaaaaatacaaaaattagcctggcatggtggcatgcgcctgtaattccagctactttggagactgagacaggagaatcacttgagcccaggaagtggaggttgcagtgagctgagatcgcgccactgcactccagcctgggtgacagagcaagactccatctcaaaaaaaaaaaaaaaacgtgtctgttcataaggttctacaaatagctgttgttacagaaaataggactagggttttattactggggattatgcagtcgaggtaaatataaaatgaggttgtttcttcttttttttatttgagacagagtcttgtttgccaggctggagtgcagtggcgtgctcttagctccgcctcccgggatcaaacgattctcttgcctcagcctctcgagtagctgggactacaggcgcgtgccaccacacccagctgatttttgtatttttagtagagatgggatttcaccatgatggccaggatggtctcgatcttttgacctcatgatccacccacctcggcctcccaaagtgctgggattacaggcgtgagccactgcacccggccctggttctaaatactcttccagctctaaaacattgattctaaacagatcacattccaggaggactctagcaaaccagcatatgcaaattatagcttttgcaagaccgtttctacttttatattactgaactctatatgattgtccaagtaaagttttgtgtctctttgattatttgattgtactttaaaattttttcaccattcatttaacattttttaccatactgtagtatttttaatgcaattgtgtttgcattggtgtggctttagaggcttctccaaccaccttcccaaaatactgatctgtgatttttttctttaatgtttggccaaacataatacatgcttattttatttttcatccctacagaaaggtagaagatgagaattctgtctcctactgttgtttttcaaggtgccactcaaatttcttgtacgtgtctagaaacttgtgcatacaatagaagtacactgtggctgggcatggtggctcatgcctgtaatcccagcactttgtgaagctgaggtgggtggatcacctgaggtcagggagtttgagaccagcctggccaacatgatgaaaccccgtctttactaaaattagaaaaaattagccaggcgtggtggtgtgcgcctgtaatcccagctactcgggaggctgaggcatgagaatcacttgaactcgggtggcagaggctgcagtgagctgagatcatgccactgcattccagcctgcgcagctgagccagactccatctccaaaaaaaaaaaaaaaaaaaaaaaaagatgtccaatatatgtaacttttttctttggacacaaaaattccattagctttgttttctcatttttacttgtcatgatgtatgtcgaacacattatttttagtgtctggtgttccattatacagatgtctctcttgttggttgaatttttgcattcacagaccctcaagttggattcatatctttttacactaagcataaagaagacggattggggtcgggtatggtggctcacgcctgtaatcccagcacttcgggaggctgaggtgggcggatcacgaggtcaggagttcgagaccagcctggccaacatactgaaaccccgtctctaaaaatatgaaaaaaaaattagccaggcgtggtggtgcgcagctgtagccccagctacttgggaggctgaggcaggagaatcacttgaacccaggaggtggaggttgcagtgagcatattgcaccattgcattccagcctgcacgacagaggaagacgccatttcaaaaaaaaaaaaaaaaagacggattgattttcttcagcagtatcaagtggcacttaccatccacccctttaacacccaaaccattctaatccatgtatacagaccatcatctgtttcgttattgtgttctataatgcagctttgcgagttatgcagttttggtcctcatgatatttttctgattggtttttaatgtattttgttctaacgagccaacattgttatacatgtaatttgtttatttgctagattgtactctttcccaaagatgggctatgaactagcatctactttcattttacctatttacctgtaaacattgaaaaaactgaatcaaatgcagtgatatcggacctagttttattgttatgccttataatgaatttaacttcacagttttctaaatgagagcatttcccaaagacatctttatggtcataaccagtttcccttggcatttgatttatttttatttttatttatttatctttttgagaaggagtttcgctcttgttgcccaggctagagtgcaatggcgtgatctcgggtcactgcaacctctgcctcccgggttcaagcgattctcctgcctcagcctccaagtagctgggattacaggcatgcaccaccacgcccgactaatttgtatttttagagacggggtttctccgtgttggtcaggctggtctcaaacttccaacctcaggtgatccgcccgccgtggcctcccaaagtgttgggattacaggcgtgagccacagtgtctggcctgatttgtttttaagagcattatttttctgctttattttgtgacttcaacatttgacacaattttgggtgaatggtttgtgcatggtgcctgacatcgtgttttgatgtgtagtatatgccataggacatgtgagacaagatatgtcccaacttgaccttgttttgtattgtttatgtcaaggtgttgagtgtattagatatactgttggggctctgtgttctagctctgccttttagataataaccatggttaaatattgcaatgtcctgcatgtctccacacatgggttttgtaactgagtcagaatgataagtgattagtaagcacattttttctcctttcaggaaaccactattttccttttctacatgctgttttgtaagtagtacttttatgaaggttgtcttcaaatgttcgcatcttccatttctactgcccttgggttatccatcctgtcattttgtgccaatcacttttttttttaacttttaagttcagggatgaaagtgtagatttgttacataggtaaacttgtgtcatggggttgttgtacagattatttcatcacccaggtgttaagcctagtatgcactagttgtttttcctgatcctctccctgctcccaccctccaccctctgataggccccagtgtgtgttgttcccctctgtgtgtccatgtgttctcatcatttagctcccacttacaagtgagaatgtggtgtttggttttctgttcctgcattagtttgctaaggataatggcctcgagctccatccaagtccctgtaaaggacatgatcttgtacttttttatggctgcatagtattctgtggtgtatatgtaccacattttctttatccagtctatcattaggcatttaggttgattccatgtttttgctattgtgaatagtgctgcaatgaacatacatgtgcatgtctttttataatagaatgatttatattctgttgtgtatatacccagtaatgggattgctgagttgaatgctatttctgcctttaggtctttgatgaattgccacactgtcttccacaatggttgaactaatttacactcccaccaacggtgaataagtgttcacttttctccacaaccttgtcagcatctattattttttgactttttagtaatagccattctgactgctcacatctattttgtaaataaagttttattgaaacatggccttacccatttgtttacatatattcatggctgtttttgtgccacaatgtcagagttgtcttaaagtagacagagactatctggctgtaaagcctgagatatatactaactggttctttatgtaaaaagtttgctgaccacctactctaaacgttttgcagtgatggtagtgttggcaaaaaaccaaatagcttaccctctttaaatttcccttttacttcttacaaactcctaacaccatttacgactttgtcatcaatatggtcaactaagcttggtttgcatggctctacttcctttcaccttccacttaggcagtgtctccaagtccactgcagtttctatttgtctcctgactgttactgtatcagttcttacctaaataacataacaactgatctccctactttttgcctatgccctcaaatgtgctcattgttgatctatctccctgttaggtgttctttttctcctctttagaaagcagccaaggaaaccagggttctctcaaagtggaaaatactggaacttatgtactgttatcataatgatagttggtgttttgaattataagaatgattccaggtggtttctaaatcatccaataaagctgtattcactctgtaaaaaaaaaaa

SEQ ID NO: 54 - DNA, 11533 bp, Homo sapiens
aggcacaggcagcctgcatacactccttttcctggtgtcaacattatttaaaagcatgggaaatagtaatgagacagtgtcttcttcattagaaccttaggagtctactagatttcttcatctctatttgttgttattagtagccaaactgtgcaaaaaacacggtcttgagaaatgacagcacagtatcttagagggaaaggaaatgtaggatgccagtgtggggacaaatttctgattgccagtgattgttgtgagcataacaataatttcatgaacattaaagcctctattgagggcagctgcagttgtaaaggaaaaaaaatggtcctgaacatttaaaactacactggtgtacatcataatcaaacaaagtaaacagaaaaaaatttaaactttgctaaaaaaaaaaagcagaagcacttgatctttaggaaggcacgcagttgcttattatgaatcatttctagagtccgatgcattttcaaagccggttacagtcattacgaagcacacccttgtgaggtaagtgtatcatcacctttggttcataaataaaaaagctgagacgccgagcgattaagtcactcgcctaaggagaatgagtcaacgtcaagagtcatagttgacccggcctaaagactccagaccatcagtccagggcttagtcagcggggcccggagtggcttccctggctggcatctggacttaggctatttccgtgcacgtaaaagcggaatattggaacggttgcacagaacttccaaataatttttaccgccacgcaagatttagccctgaggtcttaatctcaggatttgggacagtaaaagctgtcgtccctccccctcgtccagccggtggcaagcgggtactgcgggcggttccgtccgtcccctttcgcagaaatggcaacgaatgaccaccagcattagctgagccaggggacgtgggagggttgattgcctaaacgactctgcatcgccgcctctttttgaaactaagagaaaatggtgggagatcaaaagaaaactaaataaacacacaggcaacttgtcctgggacctcaactaagcaaatgaagccttattgtgtgtgctgagcctgcagttcccaaccttccggggaagatgggaggacagggcgacaaagggcacagtaggcttgcctggcagtaagtgtgaccgcagctatccaggcggaagagcagaggactgaaaccaccctccagcaagcgagtgtccgccgcgttgagaaccgcgcaccctacccatcggccacgtgaccagtcctttttaaaaaaaatttctttaccttaaaaaaaaaaaaaaaaaaaaggtgggggagagactccacttcccagaagcctctcgttactcacgcagccgcagtcttgcgcaggtgccgccagggccaaacggacatatccgtcacgtggccagaagctggccaatccggtttgaatctcatttttttcctcttacccccccttctggagcggttgtgcgatcagatcgatctaagatggcgactgtcgaaccggaaaccacccctactcctaatcccccgactacagaagaggagaaaacggaatctaatcaggaggttgctaacccagaacactatattaaacatcccctacagaacagatgggcactctggttttttaaaaatgataaaagcaaaacttggcaagcaaacctgcggctgatctccaagtttgatactgttgaagacttttgggctctgtacaaccatatccagttgtctagtaatttaatgcctggctgtgactactcactttttaaggatggtattgagcctatgtgggaagatgagaaaaacaaacggggaggacgatggctaattacattgaacaaacagcagagacgaagtgacctcgatcgcttttggctagagacacttctgtgccttattggagaatcttttgatgactacagtgatgatgtatgtggcgctgttgttaatgttagagctaaaggtgataagatagcaatatggactactgaatgtgaaaacagagaagctgttacacatatagggagggtatacaaggaaaggttaggacttcctccaaagatagtgattggttatcagtcccacgcagacacagctactaagagcggctccaccactaaaaataggtttgttgtttaagaagacaccttctgagtattctcataggagactgcgtcaagcaatcgagatttgggagctgaaccaaagcctcttcaaaaagcagagtggactgcatttaaatttgatttccatcttaatgttactcagatataagagaagtctcattcgcctttgtcttgtacttctgtgttcatttttttttttttttttggctagagtttccactatcccaatcaaagaattacagtacacatccccagaatccataaatgtgttcctggcccactctgtaatagttcagtagaattaccattaattacatacagattttacctatccacaatagtcagaaaacaacttggcatttctatactttacaggaaaaaaaattctgttgttccattttatgcagaagcatattttgctggtttgaaagattatgatgcatacagttttctagcaattttctttgtttctttttacagcattgtctttgctgtactcttgctgatggctgctagattttaatttatttgtttccctacttgataatattagtgattctgatttcagtttttcatttgttttgcttttgtttttttcctcatgtaacattggtgaaggatccaggaatatgacacaaaggtggaataaacattaattttgtgcattctttggtaattttttttgttttttgtaactacaaagctttgctacaaatttatgcatttcattcaaatcagtgatctatgtttgtgtgatttcctaaacataattgtggattataaaaaatgtaacatcataattacattcctaactagaattagtatgtctgtttttgtatctttatgctgtattttaacactttgtattacttaggttattttgctttggttaaaaatggctcaagtagaaaagcagtcccattcatattaagacagtgtacaaaactgtaaataaaatgtgtacagtgaattgtcttttagacaactagatttgtccttttatttctccatctttatagaaggaatttgtacttcttattgcaaggcagtctctatattatgtcttcttttgtggtgtcttccatgtgaacagcataagtttggagcactagtttgattattatgtttattacaatttttaataaattgaataggtagtatcatatatatggaattaaattgatgtggctatctttgtttttttataaagtaaggcacagtcattcagtcttaggtaaataatgtactctcttaatatgttaatactcatgagaattgggatctgatgcatcaccatttgattggtagcaacagtggttgtaaaacttggttgctgaattgagttgtttctatgttaagtgtcaaaatgatagtgtagggaaagtacaggtggtggggacatatgcattaagaatcttgttagtgttgcaatctaaatagaatggaataaacaggtgttaagacatatttatagtggtaaattgttgtagtatggtattctgtaaacttgaaaacttgatctactctttgtaggtatcatttgaaagcaaacttgaaaatgttttgtacatagtacatacttgtatagtcctgtgagatgaagtatggctatcagaccaaaggataagccaaactgtaggtagcagaatggaaattattattttgagaggaaaatttgtctttgaatggtgattatgacttaatcattttaaaactgataaacttgacaaaaaccctgtatgaaataaacatgaaattaatagcactgatttcattgtaaaattttaaagcagtttaaagggtaccacaggttatcacagtactctcaatgccacaaacacctcttgttcagtattctagaaatactgaatcagaattctgtgtttattataatctcagcatactgtacataatatctgctagttaaacttgggtaattggttaaggtgacttactgtctatgtcaatatgtatagttttgagtacttcaagagtttacttaaaagtgatgatgttactggtatgttggcagtgggtgggactgaagtagtgtatctattataaattgatctattttcttaattctaagatgaagtccaattttaagcatcagcttttaggtgcaaaggaggaattaacacattaaatgtatacagttctaaatttttgaaataactgatgtgtagcatttgattattggtattaccattttagaatcatgatgttattttaaacctttttcctggggacaagaaaggataataaattacgctgaatcacttttggcagttgccacttaaatagtacagtgacttgcaacttttataactttatcagcatcttctctaaatacaaaattaggctatatgttattttccaacttactgttttctctctgtttagcaggatattataaatagattaaatagatatattttctttttttttttttttttttgagacggagtctcgctttgtctcccaggctggagtgcagtggcgtgatctcccagtagctgggactacaagcacctgccaccatgcccggctaattttttttgtatttttagtagagacggggtttcactgtgttagccaagatggtctcaatctcctgactttgtgatctgcctgcttctgcctcccaaagtgctgggattacaggtgtgagccaccgtacccagcccaaatagatgtattttcataatagagaattgaaataggctttaatgggtgaatagcagtttattgtaggcatgtgacatttcatttaatgaatttaaagtttattatcccaattctacagaaggatttaatgcatactatgcaattaaataattataacactacatagtaataatttatgtgccaggcagtagttcagtcactttacatgcttattaacctgcagaataatcttttgagatgtaggtgctgttactgagaatttaacttttgcttgtaaattgcaaagggtggatttgaattctggaaatttggttccagagacaataattacataacactttctccatagggtacagcctgtctaataggctatagtaaatcacctcagcttgttataggtcgggcatgcaaacatttctccattttactccctttggtaatgaatctagtaatagatggaaattttccctagattcactgtgttagtcagttggggaagtttggaggcaaagatacaggagtttatggggaggtagtgtacataaatataatcatatgctatataaggaagttttggtcagcagcagaccatatataggatggtgggccagtaacattgtaacactgtatttttactgtatcttttccatgttttgttatgtttagatacacaaataacattatggagtattcagtatggtaacatgccatacaggtttgtagcctaggagcagtaatagactgttccctgaaacctatatttgtggtaggtttataccattcaggtttgtgtaagtacacaacgaaatcatctaatggcccatttctcaaaacatattcccatcattaatcaatgcatggtcatgttttcgtatacattttaagcttctgtattctaatctaatataaatggcaaaatattcaaactgataggcattgagattcttaaatgctaaagttgcattcaaaaggataattttaggcgttgtgacaaagcagtgttatattttaaagttagtgacaaggctatgcaccttttatctctaattgtttcttacagaatgtttttattattgagtagtaaaacaataaatgtcagatcctttatacaaattcaagattgacattgataaacaaaacttcagcatatcactcaaggtcagcgtagaaattgtgtgtctggaaacttctatagtaattttatattactgtgacattagtatgtgatcacttttctagtaatgttttaaaaaaatatatcttacaggccaggcatagtgctttatgcctgtaatcccagcactttgggaggccaaggtggcaggattgcatgagtccaggagttcaacaccagtctgggcaataaagtgagaccccatcgctacaaacaaattaaaaaatatttatgtatgtgtgtaatatatataatatataacaaaacacatatgtatgtgtatatatagtatgtctggcagagtacaatttaggggttaagactggtccctcacatatggtgtgagaaacactgttcacaggttgctttccccattagcccagggcaactcatttgcccatcatttcctagaacaaccgggtctgttacgtctacagttttcatcttcatgcagttatggatttggtgtcaaaaactttggtcctgttctctaccatcttaaaataaactcttgtgtcctgctttactatgaattgcaaagtaggcattaggtagccttcctactaccatagtttagagttcaatattcttatgaccattctactggtagaagcaaaaaatgaacttgtaggcatgtgatcacatgtgcctatggtgctgtcttttccagtacaggggaactaattttcatattttaatcttgcagctttttgtttacttcatgcattgtgatttctcatagttttgcacagaactcacttccctaccttttctgaaacaaaagtatgtatacacacatacatatgtattgagcacctctatttactgtgttccacgtgctgggcatatagcaagaacagaatggtctggggccctgctctaaagaagatttaaaagcaaacatatattaaaaatgcgtgagtctggccaggagcagtggctcatgcctgcaaccccagcactttgggaggctgaagcgggtgaatcacctgagatcaggagttgagaccagcctggccaacatggtgaaaccccgtctctactaaaaatacaaaaattagcctggcatggtggcatgcgcctgtaattccagctactttggagactgagacaggagaatcacttgagcccaggaagtggaggttgcagtgagctgagatcgcgccactgcactccagcctgggtgacagagcaagactccatctcaaaaaaaaaaaaaaaacgtgtctgttcataaggttctacaaatagctgttgttacagaaaataggactagggttttattactggggattatgcagtcgaggtaaatataaaatgaggttgtttcttcttttttttatttgagacagagtcttgtttgccaggctggagtgcagtggcgtgctcttagctccgcctcccgggatcaaacgattctcttgcctcagcctctcgagtagctgggactacaggcgcgtgccaccacacccagctgatttttgtatttttagtagagatgggatttcaccatgatggccaggatggtctcgatcttttgacctcatgatccacccacctcggcctcccaaagtgctgggattacaggcgtgagccactgcacccggccctggttctaaatactcttccagctctaaaacattgattctaaacagatcacattccaggaggactctagcaaaccagcatatgcaaattatagcttttgcaagaccgtttctacttttatattactgaactctatatgattgtccaagtaaagttttgtgtctctttgattatttgattgtactttaaaattttttcaccattcatttaacattttttaccatactgtagtatttttaatgcaattgtgtttgcattggtgtggctttagaggcttctccaaccaccttcccaaaatactgatctgtgatttttttctttaatgtttggccaaacataatacatgcttattttatttttcatccctacagaaaggtagaagatgagaattctgtctcctactgttgtttttcaaggtgccactcaaatttcttgtacgtgtctagaaacttgtgcatacaatagaagtacactgtggctgggcatggtggctcatgcctgtaatcccagcactttgtgaagctgaggtgggtggatcacctgaggtcagggagtttgagaccagcctggccaacatgatgaaaccccgtctttactaaaattagaaaaaattagccaggcgtggtggtgtgcgcctgtaatcccagctactcgggaggctgaggcatgagaatcacttgaactcgggtggcagaggctgcagtgagctgagatcatgccactgcattccagcctgcgcagctgagccagactccatctccaaaaaaaaaaaaaaaaaaaaaaaaagatgtccaatatatgtaacttttttctttggacacaaaaattccattagctttgttttctcatttttacttgtcatgatgtatgtcgaacacattatttttagtgtctggtgttccattatacagatgtctctcttgttggttgaatttttgcattcacagaccctcaagttggattcatatctttttacactaagcataaagaagacggattggggtcgggtatggtggctcacgcctgtaatcccagcacttcgggaggctgaggtgggcggatcacgaggtcaggagttcgagaccagcctggccaacatactgaaaccccgtctctaaaaatatgaaaaaaaaattagccaggcgtggtggtgcgcagctgtagccccagctacttgggaggctgaggcaggagaatcacttgaacccaggaggtggaggttgcagtgagcatattgcaccattgcattccagcctgcacgacagaggaagacgccatttcaaaaaaaaaaaaaaaaagacggattgattttcttcagcagtatcaagtggcacttaccatccacccctttaacacccaaaccattctaatccatgtatacagaccatcatctgtttcgttattgtgttctataatgcagctttgcgagttatgcagttttggtcctcatgatatttttctgattggtttttaatgtattttgttctaacgagccaacattgttatacatgtaatttgtttatttgctagattgtactctttcccaaagatgggctatgaactagcatctactttcattttacctatttacctgtaaacattgaaaaaactgaatcaaatgcagtgatatcggacctagttttattgttatgccttataatgaatttaacttcacagttttctaaatgagagcatttcccaaagacatctttatggtcataaccagtttcccttggcatttgatttatttttatttttatttatttatctttttgagaaggagtttcgctcttgttgcccaggctagagtgcaatggcgtgatctcgggtcactgcaacctctgcctcccgggttcaagcgattctcctgcctcagcctccaagtagctgggattacaggcatgcaccaccacgcccgactaatttgtatttttagagacggggtttctccgtgttggtcaggctggtctcaaacttccaacctcaggtgatccgcccgccgtggcctcccaaagtgttgggattacaggcgtgagccacagtgtctggcctgatttgtttttaagagcattatttttctgctttattttgtgacttcaacatttgacacaattttgggtgaatggtttgtgcatggtgcctgacatcgtgttttgatgtgtagtatatgccataggacatgtgagacaagatatgtcccaacttgaccttgttttgtattgtttatgtcaaggtgttgagtgtattagatatactgttggggctctgtgttctagctctgccttttagataataaccatggttaaatattgcaatgtcctgcatgtctccacacatgggttttgtaactgagtcagaatgataagtgattagtaagcacattttttctcctttcaggaaaccactattttccttttctacatgctgttttgtaagtagtacttttatgaaggttgtcttcaaatgttcgcatcttccatttctactgcccttgggttatccatcctgtcattttgtgccaatcacttttttttttaacttttaagttcagggatgaaagtgtagatttgttacataggtaaacttgtgtcatggggttgttgtacagattatttcatcacccaggtgttaagcctagtatgcactagttgtttttcctgatcctctccctgctcccaccctccaccctctgataggccccagtgtgtgttgttcccctctgtgtgtccatgtgttctcatcatttagctcccacttacaagtgagaatgtggtgtttggttttctgttcctgcattagtttgctaaggataatggcctcgagctccatccaagtccctgtaaaggacatgatcttgtacttttttatggctgcatagtattctgtggtgtatatgtaccacattttctttatccagtctatcattaggcatttaggttgattccatgtttttgctattgtgaatagtgctgcaatgaacatacatgtgcatgtctttttataatagaatgatttatattctgttgtgtatatacccagtaatgggattgctgagttgaatgctatttctgcctttaggtctttgatgaattgccacactgtcttccacaatggttgaactaatttacactcccaccaacggtgaataagtgttcacttttctccacaaccttgtcagcatctattattttttgactttttagtaatagccattctgactgctcacatctattttgtaaataaagttttattgaaacatggccttacccatttgtttacatatattcatggctgtttttgtgccacaatgtcagagttgtcttaaagtagacagagactatctggctgtaaagcctgagatatatactaactggttctttatgtaaaaagtttgctgaccacctactctaaacgttttgcagtgatggtagtgttggcaaaaaaccaaatagcttaccctctttaaatttcccttttacttcttacaaactcctaacaccatttacgactttgtcatcaatatggtcaactaagcttggtttgcatggctctacttcctttcaccttccacttaggcagtgtctccaagtccactgcagtttctatttgtctcctgactgttactgtatcagttcttacctaaataacataacaactgatctccctactttttgcctatgccctcaaatgtgctcattgttgatctatctccctgttaggtgttctttttctcctctttagaaagcagccaaggaaaccagggttctctcaaagtggaaaatactggaacttatgtactgttatcataatgatagttggtgttttgaattataagaatgattccaggtggtttctaaatcatccaataaagctgtattcactctgtaaaaaaaaaaa

SEQ ID NO: 55 - DNA, 11815 bp, Homo sapiens
aggcacaggcagcctgcatacactccttttcctggtgtcaacattatttaaaagcatgggaaatagtaatgagacagtgtcttcttcattagaaccttaggagtctactagatttcttcatctctatttgttgttattagtagccaaactgtgcaaaaaacacggtcttgagaaatgacagcacagtatcttagagggaaaggaaatgtaggatgccagtgtggggacaaatttctgattgccagtgattgttgtgagcataacaataatttcatgaacattaaagcctctattgagggcagctgcagttgtaaaggaaaaaaaatggtcctgaacatttaaaactacactggtgtacatcataatcaaacaaagtaaacagaaaaaaatttaaactttgctaaaaaaaaaaagcagaagcacttgatctttaggaaggcacgcagttgcttattatgaatcatttctagagtccgatgcattttcaaagccggttacagtcattacgaagcacacccttgtgaggtaagtgtatcatcacctttggttcataaataaaaaagctgagacgccgagcgattaagtcactcgcctaaggagaatgagtcaacgtcaagagtcatagttgacccggcctaaagactccagaccatcagtccagggcttagtcagcggggcccggagtggcttccctggctggcatctggacttaggctatttccgtgcacgtaaaagcggaatattggaacggttgcacagaacttccaaataatttttaccgccacgcaagatttagccctgaggtcttaatctcaggatttgggacagtaaaagctgtcgtccctccccctcgtccagccggtggcaagcgggtactgcgggcggttccgtccgtcccctttcgcagaaatggcaacgaatgaccaccagcattagctgagccaggggacgtgggagggttgattgcctaaacgactctgcatcgccgcctctttttgaaactaagagaaaatggtgggagatcaaaagaaaactaaataaacacacaggcaacttgtcctgggacctcaactaagcaaatgaagccttattgtgtgtgctgagcctgcagttcccaaccttccggggaagatgggaggacagggcgacaaagggcacagtaggcttgcctggcagtaagtgtgaccgcagctatccaggcggaagagcagaggactgaaaccaccctccagcaagcgagtgtccgccgcgttgagaaccgcgcaccctacccatcggccacgtgaccagtcctttttaaaaaaaatttctttaccttaaaaaaaaaaaaaaaaaaaaggtgggggagagactccacttcccagaagcctctcgttactcacgcagccgcagtcttgcgcaggtgccgccagggccaaacggacatatccgtcacgtggccagaagctggccaatccggtttgaatctcatttttttcctcttacccccccttctggagcggttgtgcgatcagatcgatctaagatggcgactgtcgaaccgggtgctgtgaggaaatgcatggtttgttgaaaagaactgaggactgacagccgcctcctccatgattaccctggctctctgtcccacccttctcatggcgcttgggggaccatggctgatcctgtcctgagacaaattaagactcctgtggtgaagcagttggtcgagaaaaagtgatgcatgaaaaagaagcaaaacaagaaggaaagaaaaaaaatgagagctgaagatggtgaaaatgatgccattaaaaagcaggcagaaagtctgcgagaatcccaggaaaccacccctactcctaatcccccgactacagaagaggagaaaacggaatctaatcaggaggttgctaacccagaacactatattaaacatcccctacagaacagatgggcactctggttttttaaaaatgataaaagcaaaacttggcaagcaaacctgcggctgatctccaagtttgatactgttgaagacttttgggctctgtacaaccatatccagttgtctagtaatttaatgcctggctgtgactactcactttttaaggatggtattgagcctatgtgggaagatgagaaaaacaaacggggaggacgatggctaattacattgaacaaacagcagagacgaagtgacctcgatcgcttttggctagagacacttctgtgccttattggagaatcttttgatgactacagtgatgatgtatgtggcgctgttgttaatgttagagctaaaggtgataagatagcaatatggactactgaatgtgaaaacagagaagctgttacacatatagggagggtatacaaggaaaggttaggacttcctccaaagatagtgattggttatcagtcccacgcagacacagctactaagagcggctccaccactaaaaataggtttgttgtttaagaagacaccttctgagtattctcataggagactgcgtcaagcaatcgagatttgggagctgaaccaaagcctcttcaaaaagcagagtggactgcatttaaatttgatttccatcttaatgttactcagatataagagaagtctcattcgcctttgtcttgtacttctgtgttcatttttttttttttttttggctagagtttccactatcccaatcaaagaattacagtacacatccccagaatccataaatgtgttcctggcccactctgtaatagttcagtagaattaccattaattacatacagattttacctatccacaatagtcagaaaacaacttggcatttctatactttacaggaaaaaaaattctgttgttccattttatgcagaagcatattttgctggtttgaaagattatgatgcatacagttttctagcaattttctttgtttctttttacagcattgtctttgctgtactcttgctgatggctgctagattttaatttatttgtttccctacttgataatattagtgattctgatttcagtttttcatttgttttgcttttgtttttttcctcatgtaacattggtgaaggatccaggaatatgacacaaaggtggaataaacattaattttgtgcattctttggtaattttttttgttttttgtaactacaaagctttgctacaaatttatgcatttcattcaaatcagtgatctatgtttgtgtgatttcctaaacataattgtggattataaaaaatgtaacatcataattacattcctaactagaattagtatgtctgtttttgtatctttatgctgtattttaacactttgtattacttaggttattttgctttggttaaaaatggctcaagtagaaaagcagtcccattcatattaagacagtgtacaaaactgtaaataaaatgtgtacagtgaattgtcttttagacaactagatttgtccttttatttctccatctttatagaaggaatttgtacttcttattgcaaggcagtctctatattatgtcttcttttgtggtgtcttccatgtgaacagcataagtttggagcactagtttgattattatgtttattacaatttttaataaattgaataggtagtatcatatatatggaattaaattgatgtggctatctttgtttttttataaagtaaggcacagtcattcagtcttaggtaaataatgtactctcttaatatgttaatactcatgagaattgggatctgatgcatcaccatttgattggtagcaacagtggttgtaaaacttggttgctgaattgagttgtttctatgttaagtgtcaaaatgatagtgtagggaaagtacaggtggtggggacatatgcattaagaatcttgttagtgttgcaatctaaatagaatggaataaacaggtgttaagacatatttatagtggtaaattgttgtagtatggtattctgtaaacttgaaaacttgatctactctttgtaggtatcatttgaaagcaaacttgaaaatgttttgtacatagtacatacttgtatagtcctgtgagatgaagtatggctatcagaccaaaggataagccaaactgtaggtagcagaatggaaattattattttgagaggaaaatttgtctttgaatggtgattatgacttaatcattttaaaactgataaacttgacaaaaaccctgtatgaaataaacatgaaattaatagcactgatttcattgtaaaattttaaagcagtttaaagggtaccacaggttatcacagtactctcaatgccacaaacacctcttgttcagtattctagaaatactgaatcagaattctgtgtttattataatctcagcatactgtacataatatctgctagttaaacttgggtaattggttaaggtgacttactgtctatgtcaatatgtatagttttgagtacttcaagagtttacttaaaagtgatgatgttactggtatgttggcagtgggtgggactgaagtagtgtatctattataaattgatctattttcttaattctaagatgaagtccaattttaagcatcagcttttaggtgcaaaggaggaattaacacattaaatgtatacagttctaaatttttgaaataactgatgtgtagcatttgattattggtattaccattttagaatcatgatgttattttaaacctttttcctggggacaagaaaggataataaattacgctgaatcacttttggcagttgccacttaaatagtacagtgacttgcaacttttataactttatcagcatcttctctaaatacaaaattaggctatatgttattttccaacttactgttttctctctgtttagcaggatattataaatagattaaatagatatattttctttttttttttttttttttgagacggagtctcgctttgtctcccaggctggagtgcagtggcgtgatctcccagtagctgggactacaagcacctgccaccatgcccggctaattttttttgtatttttagtagagacggggtttcactgtgttagccaagatggtctcaatctcctgactttgtgatctgcctgcttctgcctcccaaagtgctgggattacaggtgtgagccaccgtacccagcccaaatagatgtattttcataatagagaattgaaataggctttaatgggtgaatagcagtttattgtaggcatgtgacatttcatttaatgaatttaaagtttattatcccaattctacagaaggatttaatgcatactatgcaattaaataattataacactacatagtaataatttatgtgccaggcagtagttcagtcactttacatgcttattaacctgcagaataatcttttgagatgtaggtgctgttactgagaatttaacttttgcttgtaaattgcaaagggtggatttgaattctggaaatttggttccagagacaataattacataacactttctccatagggtacagcctgtctaataggctatagtaaatcacctcagcttgttataggtcgggcatgcaaacatttctccattttactccctttggtaatgaatctagtaatagatggaaattttccctagattcactgtgttagtcagttggggaagtttggaggcaaagatacaggagtttatggggaggtagtgtacataaatataatcatatgctatataaggaagttttggtcagcagcagaccatatataggatggtgggccagtaacattgtaacactgtatttttactgtatcttttccatgttttgttatgtttagatacacaaataacattatggagtattcagtatggtaacatgccatacaggtttgtagcctaggagcagtaatagactgttccctgaaacctatatttgtggtaggtttataccattcaggtttgtgtaagtacacaacgaaatcatctaatggcccatttctcaaaacatattcccatcattaatcaatgcatggtcatgttttcgtatacattttaagcttctgtattctaatctaatataaatggcaaaatattcaaactgataggcattgagattcttaaatgctaaagttgcattcaaaaggataattttaggcgttgtgacaaagcagtgttatattttaaagttagtgacaaggctatgcaccttttatctctaattgtttcttacagaatgtttttattattgagtagtaaaacaataaatgtcagatcctttatacaaattcaagattgacattgataaacaaaacttcagcatatcactcaaggtcagcgtagaaattgtgtgtctggaaacttctatagtaattttatattactgtgacattagtatgtgatcacttttctagtaatgttttaaaaaaatatatcttacaggccaggcatagtgctttatgcctgtaatcccagcactttgggaggccaaggtggcaggattgcatgagtccaggagttcaacaccagtctgggcaataaagtgagaccccatcgctacaaacaaattaaaaaatatttatgtatgtgtgtaatatatataatatataacaaaacacatatgtatgtgtatatatagtatgtctggcagagtacaatttaggggttaagactggtccctcacatatggtgtgagaaacactgttcacaggttgctttccccattagcccagggcaactcatttgcccatcatttcctagaacaaccgggtctgttacgtctacagttttcatcttcatgcagttatggatttggtgtcaaaaactttggtcctgttctctaccatcttaaaataaactcttgtgtcctgctttactatgaattgcaaagtaggcattaggtagccttcctactaccatagtttagagttcaatattcttatgaccattctactggtagaagcaaaaaatgaacttgtaggcatgtgatcacatgtgcctatggtgctgtcttttccagtacaggggaactaattttcatattttaatcttgcagctttttgtttacttcatgcattgtgatttctcatagttttgcacagaactcacttccctaccttttctgaaacaaaagtatgtatacacacatacatatgtattgagcacctctatttactgtgttccacgtgctgggcatatagcaagaacagaatggtctggggccctgctctaaagaagatttaaaagcaaacatatattaaaaatgcgtgagtctggccaggagcagtggctcatgcctgcaaccccagcactttgggaggctgaagcgggtgaatcacctgagatcaggagttgagaccagcctggccaacatggtgaaaccccgtctctactaaaaatacaaaaattagcctggcatggtggcatgcgcctgtaattccagctactttggagactgagacaggagaatcacttgagcccaggaagtggaggttgcagtgagctgagatcgcgccactgcactccagcctgggtgacagagcaagactccatctcaaaaaaaaaaaaaaaacgtgtctgttcataaggttctacaaatagctgttgttacagaaaataggactagggttttattactggggattatgcagtcgaggtaaatataaaatgaggttgtttcttcttttttttatttgagacagagtcttgtttgccaggctggagtgcagtggcgtgctcttagctccgcctcccgggatcaaacgattctcttgcctcagcctctcgagtagctgggactacaggcgcgtgccaccacacccagctgatttttgtatttttagtagagatgggatttcaccatgatggccaggatggtctcgatcttttgacctcatgatccacccacctcggcctcccaaagtgctgggattacaggcgtgagccactgcacccggccctggttctaaatactcttccagctctaaaacattgattctaaacagatcacattccaggaggactctagcaaaccagcatatgcaaattatagcttttgcaagaccgtttctacttttatattactgaactctatatgattgtccaagtaaagttttgtgtctctttgattatttgattgtactttaaaattttttcaccattcatttaacattttttaccatactgtagtatttttaatgcaattgtgtttgcattggtgtggctttagaggcttctccaaccaccttcccaaaatactgatctgtgatttttttctttaatgtttggccaaacataatacatgcttattttatttttcatccctacagaaaggtagaagatgagaattctgtctcctactgttgtttttcaaggtgccactcaaatttcttgtacgtgtctagaaacttgtgcatacaatagaagtacactgtggctgggcatggtggctcatgcctgtaatcccagcactttgtgaagctgaggtgggtggatcacctgaggtcagggagtttgagaccagcctggccaacatgatgaaaccccgtctttactaaaattagaaaaaattagccaggcgtggtggtgtgcgcctgtaatcccagctactcgggaggctgaggcatgagaatcacttgaactcgggtggcagaggctgcagtgagctgagatcatgccactgcattccagcctgcgcagctgagccagactccatctccaaaaaaaaaaaaaaaaaaaaaaaaagatgtccaatatatgtaacttttttctttggacacaaaaattccattagctttgttttctcatttttacttgtcatgatgtatgtcgaacacattatttttagtgtctggtgttccattatacagatgtctctcttgttggttgaatttttgcattcacagaccctcaagttggattcatatctttttacactaagcataaagaagacggattggggtcgggtatggtggctcacgcctgtaatcccagcacttcgggaggctgaggtgggcggatcacgaggtcaggagttcgagaccagcctggccaacatactgaaaccccgtctctaaaaatatgaaaaaaaaattagccaggcgtggtggtgcgcagctgtagccccagctacttgggaggctgaggcaggagaatcacttgaacccaggaggtggaggttgcagtgagcatattgcaccattgcattccagcctgcacgacagaggaagacgccatttcaaaaaaaaaaaaaaaaagacggattgattttcttcagcagtatcaagtggcacttaccatccacccctttaacacccaaaccattctaatccatgtatacagaccatcatctgtttcgttattgtgttctataatgcagctttgcgagttatgcagttttggtcctcatgatatttttctgattggtttttaatgtattttgttctaacgagccaacattgttatacatgtaatttgtttatttgctagattgtactctttcccaaagatgggctatgaactagcatctactttcattttacctatttacctgtaaacattgaaaaaactgaatcaaatgcagtgatatcggacctagttttattgttatgccttataatgaatttaacttcacagttttctaaatgagagcatttcccaaagacatctttatggtcataaccagtttcccttggcatttgatttatttttatttttatttatttatctttttgagaaggagtttcgctcttgttgcccaggctagagtgcaatggcgtgatctcgggtcactgcaacctctgcctcccgggttcaagcgattctcctgcctcagcctccaagtagctgggattacaggcatgcaccaccacgcccgactaatttgtatttttagagacggggtttctccgtgttggtcaggctggtctcaaacttccaacctcaggtgatccgcccgccgtggcctcccaaagtgttgggattacaggcgtgagccacagtgtctggcctgatttgtttttaagagcattatttttctgctttattttgtgacttcaacatttgacacaattttgggtgaatggtttgtgcatggtgcctgacatcgtgttttgatgtgtagtatatgccataggacatgtgagacaagatatgtcccaacttgaccttgttttgtattgtttatgtcaaggtgttgagtgtattagatatactgttggggctctgtgttctagctctgccttttagataataaccatggttaaatattgcaatgtcctgcatgtctccacacatgggttttgtaactgagtcagaatgataagtgattagtaagcacattttttctcctttcaggaaaccactattttccttttctacatgctgttttgtaagtagtacttttatgaaggttgtcttcaaatgttcgcatcttccatttctactgcccttgggttatccatcctgtcattttgtgccaatcacttttttttttaacttttaagttcagggatgaaagtgtagatttgttacataggtaaacttgtgtcatggggttgttgtacagattatttcatcacccaggtgttaagcctagtatgcactagttgtttttcctgatcctctccctgctcccaccctccaccctctgataggccccagtgtgtgttgttcccctctgtgtgtccatgtgttctcatcatttagctcccacttacaagtgagaatgtggtgtttggttttctgttcctgcattagtttgctaaggataatggcctcgagctccatccaagtccctgtaaaggacatgatcttgtacttttttatggctgcatagtattctgtggtgtatatgtaccacattttctttatccagtctatcattaggcatttaggttgattccatgtttttgctattgtgaatagtgctgcaatgaacatacatgtgcatgtctttttataatagaatgatttatattctgttgtgtatatacccagtaatgggattgctgagttgaatgctatttctgcctttaggtctttgatgaattgccacactgtcttccacaatggttgaactaatttacactcccaccaacggtgaataagtgttcacttttctccacaaccttgtcagcatctattattttttgactttttagtaatagccattctgactgctcacatctattttgtaaataaagttttattgaaacatggccttacccatttgtttacatatattcatggctgtttttgtgccacaatgtcagagttgtcttaaagtagacagagactatctggctgtaaagcctgagatatatactaactggttctttatgtaaaaagtttgctgaccacctactctaaacgttttgcagtgatggtagtgttggcaaaaaaccaaatagcttaccctctttaaatttcccttttacttcttacaaactcctaacaccatttacgactttgtcatcaatatggtcaactaagcttggtttgcatggctctacttcctttcaccttccacttaggcagtgtctccaagtccactgcagtttctatttgtctcctgactgttactgtatcagttcttacctaaataacataacaactgatctccctactttttgcctatgccctcaaatgtgctcattgttgatctatctccctgttaggtgttctttttctcctctttagaaagcagccaaggaaaccagggttctctcaaagtggaaaatactggaacttatgtactgttatcataatgatagttggtgttttgaattataagaatgattccaggtggtttctaaatcatccaataaagctgtattcactctgtaaaaaaaaaaa

SEQ ID NO: 56 - protein, 237 aa, Homo sapiens
MLDLTSRGQVGTSRRMAEAACSAHFLETTPTPNPPTTEEEKTESNQEVANPEHYIKHPLQNRWALWFFKNDKSKTWQANLRLISKFDTVEDFWALYNHIQLSSNLMPGCDYSLFKDGIEPMWEDEKNKRGGRWLITLNKQQRRSDLDRFWLETLLCLIGESFDDYSDDVCGAVVNVRAKGDKIAIWTTECENREAVTHIGRVYKERLGLPPKIVIGYQSHADTATKSGSTTKNRFVV

SEQ ID NO: 57 - protein, 248 aa, Homo sapiens
MATVEPETTPTPNPPTTEEEKTESNQEVANPEHYIKHPLQNRWALWFFKNDKSKTWQANLRLISKFDTVEDFWALYNHIQLSSNLMPGCDYSLFKDGIEPMWEDEKNKRGGRWLITLNKQQRRSDLDRFWLETRWDLAMLPRLVSNFWPQVILPLQPPKVLELQLLCLIGESFDDYSDDVCGAVVNVRAKGDKIAIWTTECENREAVTHIGRVYKERLGLPPKIVIGYQSHADTATKSGSTTKNRFVV

SEQ ID NO: 58 - protein, 245 aa, Homo sapiens
MKKKQNKKERKKMRAEDGENDAIKKQAESLRESQETTPTPNPPTTEEEKTESNQEVANPEHYIKHPLQNRWALWFFKNDKSKTWQANLRLISKFDTVEDFWALYNHIQLSSNLMPGCDYSLFKDGIEPMWEDEKNKRGGRWLITLNKQQRRSDLDRFWLETLLCLIGESFDDYSDDVCGAVVNVRAKGDKIAIWTTECENREAVTHIGRVYKERLGLPPKIVIGYQSHADTATKSGSTTKNRFVV

SEQ ID NO: 59 - protein, 217 aa, Homo sapiens [sequence omitted]

SEQ ID NO: 60 - DNA, 4860 bp, Artificial Sequence
  Description of Artificial Sequence: Synthetic polynucleotide
atgggtaagcctatccctaaccctctcctcggtctcgattctacggctagcatggacaagaagtacagcatcggcctggccatcggcaccaactctgtgggctgggccgtgatcaccgacgagtacaaggtgcccagcaagaaattcaaggtgctgggcaacaccgaccggcacagcatcaagaagaacctgatcggcgccctgctgttcgacagcggagaaacagccgaggccacccggctgaagagaaccgccagaagaagatacaccagacggaagaaccggatctgctatctgcaagagatcttcagcaacgagatggccaaggtggacgacagcttcttccacagactggaagagtccttcctggtggaagaggataagaagcacgagcggcaccccatcttcggcaacatcgtggacgaggtggcctaccacgagaagtaccccaccatctaccacctgagaaagaaactggtggacagcaccgacaaggccgacctgcggctgatctatctggccctggcccacatgatcaagttccggggccacttcctgatcgagggcgacctgaaccccgacaacagcgacgtggacaagctgttcatccagctggtgcagacctacaaccagctgttcgaggaaaaccccatcaacgccagcggcgtggacgccaaggccatcctgtctgccagactgagcaagagcagacggctggaaaatctgatcgcccagctgcccggcgagaagaagaatggcctgttcggcaacctgattgccctgagcctgggcctgacccccaacttcaagagcaacttcgacctggccgaggatgccaaactgcagctgagcaaggacacctacgacgacgacctggacaacctgctggcccagatcggcgaccagtacgccgacctgtttctggccgccaagaacctgtccgacgccatcctgctgagcgacatcctgagagtgaacaccgagatcaccaaggcccccctgagcgcctctatgatcaagagatacgacgagcaccaccaggacctgaccctgctgaaagctctcgtgcggcagcagctgcctgagaagtacaaagagattttcttcgaccagagcaagaacggctacgccggctacatcgatggcggagccagccaggaagagttctacaagttcatcaagcccatcctggaaaagatggacggcaccgaggaactgctcgtgaagctgaacagagaggacctgctgcggaagcagcggaccttcgacaacggcagcatcccccaccagatccacctgggagagctgcacgccattctgcggcggcaggaagatttttacccattcctgaaggacaaccgggaaaagatcgagaagatcctgaccttccgcatcccctactacgtgggccctctggccaggggaaacagcagattcgcctggatgaccagaaagagcgaggaaaccatcaccccctggaacttcgaggaagtggtggacaagggcgccagcgcccagagcttcatcgagcggatgaccaacttcgataagaacctgcccaacgagaaggtgctgcccaagcacagcctgctgtacgagtacttcaccgtgtacaacgagctgaccaaagtgaaatacgtgaccgagggaatgagaaagcccgccttcctgagcggcgagcagaaaaaagccatcgtggacctgctgttcaagaccaaccggaaagtgaccgtgaagcagctgaaagaggactacttcaagaaaatcgagtgcttcgactccgtggaaatctccggcgtggaagatcggttcaacgcctccctgggcacataccacgatctgctgaaaattatcaaggacaaggacttcctggacaatgaggaaaacgaggacattctggaagatatcgtgctgaccctgacactgtttgaggacagagagatgatcgaggaacggctgaaaacctatgcccacctgttcgacgacaaagtgatgaagcagctgaagcggcggagatacaccggctggggcaggctgagccggaagctgatcaacggcatccgggacaagcagtccggcaagacaatcctggatttcctgaagtccgacggcttcgccaacagaaacttcatgcagctgatccacgacgacagcctgacctttaaagaggacatccagaaagcccaggtgtccggccagggcgatagcctgcacgagcacattgccaatctggccggcagccccgccattaagaagggcatcctgcagacagtgaaggtggtggacgagctcgtgaaagtgatgggccggcacaagcccgagaacatcgtgatcgaaatggccagagagaaccagaccacccagaagggacagaagaacagccgcgagagaatgaagcggatcgaagagggcatcaaagagctgggcagccagatcctgaaagaacaccccgtggaaaacacccagctgcagaacgagaagctgtacctgtactacctgcagaatgggcgggatatgtacgtggaccaggaactggacatcaaccggctgtccgactacgatgtggacgctatcgtgcctcagagctttctgaaggacgactccatcgataacaaagtgctgactcggagcgacaagaaccggggcaagagcgacaacgtgccctccgaagaggtcgtgaagaagatgaagaactactggcgccagctgctgaatgccaagctgattacccagaggaagttcgacaatctgaccaaggccgagagaggcggcctgagcgaactggataaggccggcttcatcaagagacagctggtggaaacccggcagatcacaaagcacgtggcacagatcctggactcccggatgaacactaagtacgacgagaacgacaaactgatccgggaagtgaaagtgatcaccctgaagtccaagctggtgtccgatttccggaaggatttccagttttacaaagtgcgcgagatcaacaactaccaccacgcccacgacgcctacctgaacgccgtcgtgggaaccgccctgatcaaaaagtaccctaagctggaaagcgagttcgtgtacggcgactacaaggtgtacgacgtgcggaagatgatcgccaagagcgagcaggaaatcggcaaggctaccgccaagtacttcttctacagcaacatcatgaactttttcaagaccgagattaccctggccaacggcgagatccggaagcggcctctgatcgagacaaacggcgaaacaggcgagatcgtgtgggataagggccgggactttgccaccgtgcggaaagtgctgtctatgccccaagtgaatatcgtgaaaaagaccgaggtgcagacaggcggcttcagcaaagagtctatcctgcccaagaggaacagcgacaagctgatcgccagaaagaaggactgggaccctaagaagtacggcggcttcgacagccccaccgtggcctattctgtgctggtggtggccaaagtggaaaagggcaagtccaagaaactgaagagtgtgaaagagctgctggggatcaccatcatggaaagaagcagcttcgagaagaatcccatcgactttctggaagccaagggctacaaagaagtgaaaaaggacctgatcatcaagctgcctaagtactccctgttcgagctggaaaacggccggaagagaatgctggcctctgccggcgaactgcagaagggaaacgaactggccctgccctccaaatatgtgaacttcctgtacctggccagccactatgagaagctgaagggctcccccgaggataatgagcagaaacagctgtttgtggaacagcacaaacactacctggacgagatcatcgagcagatcagcgagttctccaagagagtgatcctggccgacgctaatctggacaaggtgctgagcgcctacaacaagcacagagacaagcctatcagagagcaggccgagaatatcatccacctgtttaccctgaccaatctgggagcccctgccgccttcaagtactttgacaccaccatcgaccggaagaggtacaccagcaccaaagaggtgctggacgccaccctgatccaccagagcatcaccggcctgtacgagacacggatcgacctgtctcagctgggaggcgacctcgagggcggatccggtggttccggaggagctgtcgacatggcgactgtcgaaccggaaaccacccctactcctaatcccccgactacagaagaggagaaaacggaatctaatcaggaggttgctaacccagaacactatattaaacggcccctacagaacagatgggcactctggttttttaaaaatgataaaagcaaaacttggcaagcaaacctgcggctgatctccaagtttgatactgctgaagacttttttgctctgtacaaccatatccagttgtctagtaatttaatgcctggctgtgactactcactttttaaggatggtattgagcctatgtgggaagatgagaaaaacaaacggggaggacgatggctaattacattgaacaaacagcagagacgaagtgacctcgatcgcttttggctagagacacttctgtgccttattggagaatcttttgatgactacagtgatgatgtatgtggcgctgttgttaatgttagagctaaaggtgataagatagcaatatggactactgaatgtgaaaacagagaagctgttacacatatagggagggtatacaaggaaaggttaggacttcctccaaagatagtgattggttatcagtcccacgcagacacagctactaagagcggcgacaccactaaaaataggtttgttgtttctagacttaagtaa

SEQ ID NO: 61 - DNA, 877 bp, Homo sapiens
ggggcgaggcggagcgaggctggaggcgcgggagggcagcgagaggttcgcgggtgcagcgcacaggagaccatgtccgggggcagcagctgcagccagaccccaagccgggccatccccgccactcgccgggtggtgctcggcgacggcgtgcagctcccgcccggggactacagcacgacccccggcggcacgctcttcagcaccaccccgggaggtaccaggatcatctatgaccggaaattcctgatggagtgtcggaactcacctgtgaccaaaacacccccaagggatctgcccaccattccgggggtcaccagcccttccagtgatgagccccccatggaagccagccagagccacctgcgcaatagcccagaagataagcgggcgggcggtgaagagtcacagtttgagatggacatttaaagcaccagccatcgtgtggagcactaccaaggggcccctcagggccttcctgggaggagtcccaccagccaggccttatgaaagtgatcatactgggcaggcgttggcgtggggtcggacaccccagccctttctccctcactcagggcacctgccccctcctcttcgtgaacaccagcagatacctccttgtgcctccactgatgcaggagctgccaccccaaggggagtgacccctgccagcacaccctgcagccaagggccaggaagtggacaagaacgaacccttccttccgaatgatcagcagttccagcccctcgctgctgggggcgcaaccaccccttccttaggttgatgtgcttgggaaagctccctccccctccttccccaagagaggaaataaaagccaccttcgccctagggccaagaaaaaaaaaaaaaaaaaaa

SEQ ID NO: 62 - protein, 118 aa, Homo sapiens
MSGGSSCSQTPSRAIPATRRVVLGDGVQLPPGDYSTTPGGTLFSTTPGGTRIIYDRKFLMECRNSPVTKTPPRDLPTIPGVTSPSSDEPPMEASQSHLRNSPEDKRAGGEESQFEMDI

SEQ ID NO: 63 - DNA, 4560 bp, Artificial Sequence
  Description of Artificial Sequence: Synthetic polynucleotide
atgggtaagcctatccctaaccctctcctcggtctcgattctacggctagcatggacaagaagtacagcatcggcctggccatcggcaccaactctgtgggctgggccgtgatcaccgacgagtacaaggtgcccagcaagaaattcaaggtgctgggcaacaccgaccggcacagcatcaagaagaacctgatcggcgccctgctgttcgacagcggagaaacagccgaggccacccggctgaagagaaccgccagaagaagatacaccagacggaagaaccggatctgctatctgcaagagatcttcagcaacgagatggccaaggtggacgacagcttcttccacagactggaagagtccttcctggtggaagaggataagaagcacgagcggcaccccatcttcggcaacatcgtggacgaggtggcctaccacgagaagtaccccaccatctaccacctgagaaagaaactggtggacagcaccgacaaggccgacctgcggctgatctatctggccctggcccacatgatcaagttccggggccacttcctgatcgagggcgacctgaaccccgacaacagcgacgtggacaagctgttcatccagctggtgcagacctacaaccagctgttcgaggaaaaccccatcaacgccagcggcgtggacgccaaggccatcctgtctgccagactgagcaagagcagacggctggaaaatctgatcgcccagctgcccggcgagaagaagaatggcctgttcggcaacctgattgccctgagcctgggcctgacccccaacttcaagagcaacttcgacctggccgaggatgccaaactgcagctgagcaaggacacctacgacgacgacctggacaacctgctggcccagatcggcgaccagtacgccgacctgtttctggccgccaagaacctgtccgacgccatcctgctgagcgacatcctgagagtgaacaccgagatcaccaaggcccccctgagcgcctctatgatcaagagatacgacgagcaccaccaggacctgaccctgctgaaagctctcgtgcggcagcagctgcctgagaagtacaaagagattttcttcgaccagagcaagaacggctacgccggctacatcgatggcggagccagccaggaagagttctacaagttcatcaagcccatcctggaaaagatggacggcaccgaggaactgctcgtgaagctgaacagagaggacctgctgcggaagcagcggaccttcgacaacggcagcatcccccaccagatccacctgggagagctgcacgccattctgcggcggcaggaagatttttacccattcctgaaggacaaccgggaaaagatcgagaagatcctgaccttccgcatcccctactacgtgggccctctggccaggggaaacagcagattcgcctggatgaccagaaagagcgaggaaaccatcaccccctggaacttcgaggaagtggtggacaagggcgccagcgcccagagcttcatcgagcggatgaccaacttcgataagaacctgcccaacgagaaggtgctgcccaagcacagcctgctgtacgagtacttcaccgtgtacaacgagctgaccaaagtgaaatacgtgaccgagggaatgagaaagcccgccttcctgagcggcgagcagaaaaaagccatcgtggacctgctgttcaagaccaaccggaaagtgaccgtgaagcagctgaaagaggactacttcaagaaaatcgagtgcttcgactccgtggaaatctccggcgtggaagatcggttcaacgcctccctgggcacataccacgatctgctgaaaattatcaaggacaaggacttcctggacaatgaggaaaacgaggacattctggaagatatcgtgctgaccctgacactgtttgaggacagagagatgatcgaggaacggctgaaaacctatgcccacctgttcgacgacaaagtgatgaagcagctgaagcggcggagatacaccggctggggcaggctgagccggaagctgatcaacggcatccgggacaagcagtccggcaagacaatcctggatttcctgaagtccgacggcttcgccaacagaaacttcatgcagctgatccacgacgacagcctgacctttaaagaggacatccagaaagcccaggtgtccggccagggcgatagcctgcacgagcacattgccaatctggccggcagccccgccattaagaagggcatcctgcagacagtgaaggtggtggacgagctcgtgaaagtgatgggccggcacaagcccgagaacatcgtgatcgaaatggccagagagaaccagaccacccagaagggacagaagaacagccgcgagagaatgaagcggatcgaagagggcatcaaagagctgggcagccagatcctgaaagaacaccccgtggaaaacacccagctgcagaacgagaagctgtacctgtactacctgcagaatgggcgggatatgtacgtggaccaggaactggacatcaaccggctgtccgactacgatgtggacgctatcgtgcctcagagctttctgaaggacgactccatcgataacaaagtgctgactcggagcgacaagaaccggggcaagagcgacaacgtgccctccgaagaggtcgtgaagaagatgaagaactactggcgccagctgctgaatgccaagctgattacccagaggaagttcgacaatctgaccaaggccgagagaggcggcctgagcgaactggataaggccggcttcatcaagagacagctggtggaaacccggcagatcacaaagcacgtggcacagatcctggactcccggatgaacactaagtacgacgagaacgacaaactgatccgggaagtgaaagtgatcaccctgaagtccaagctggtgtccgatttccggaaggatttccagttttacaaagtgcgcgagatcaacaactaccaccacgcccacgacgcctacctgaacgccgtcgtgggaaccgccctgatcaaaaagtaccctaagctggaaagcgagttcgtgtacggcgactacaaggtgtacgacgtgcggaagatgatcgccaagagcgagcaggaaatcggcaaggctaccgccaagtacttcttctacagcaacatcatgaactttttcaagaccgagattaccctggccaacggcgagatccggaagcggcctctgatcgagacaaacggcgaaacaggcgagatcgtgtgggataagggccgggactttgccaccgtgcggaaagtgctgtctatgccccaagtgaatatcgtgaaaaagaccgaggtgcagacaggcggcttcagcaaagagtctatcctgcccaagaggaacagcgacaagctgatcgccagaaagaaggactgggaccctaagaagtacggcggcttcgacagccccaccgtggcctattctgtgctggtggtggccaaagtggaaaagggcaagtccaagaaactgaagagtgtgaaagagctgctggggatcaccatcatggaaagaagcagcttcgagaagaatcccatcgactttctggaagccaagggctacaaagaagtgaaaaaggacctgatcatcaagctgcctaagtactccctgttcgagctggaaaacggccggaagagaatgctggcctctgccggcgaactgcagaagggaaacgaactggccctgccctccaaatatgtgaacttcctgtacctggccagccactatgagaagctgaagggctcccccgaggataatgagcagaaacagctgtttgtggaacagcacaaacactacctggacgagatcatcgagcagatcagcgagttctccaagagagtgatcctggccgacgctaatctggacaaggtgctgagcgcctacaacaagcacagagacaagcctatcagagagcaggccgagaatatcatccacctgtttaccctgaccaatctgggagcccctgccgccttcaagtactttgacaccaccatcgaccggaagaggtacaccagcaccaaagaggtgctggacgccaccctgatccaccagagcatcaccggcctgtacgagacacggatcgacctgtctcagctgggaggcgacctcgagggcggatccggtggttccggaggagctgtcgacatgtccgggggcagcagctgcagccagaccccaagcgctgccgcagccgccactcgccgggtggtgctcggcgccggcgtgcagctcccgcccggggactacagcacggcccccggcggcacgctcttcagcaccgccccgggaggtaccaggatcatctatgaccggaaattcctgatggagtgtcggaacgcacctgtgaccaaagcacccccaagggatctgcccaccattccgggggtcaccagcccttccagtgatgagccccccatggaagccagccagagccacctgcgcaatagcccagaagataagcgggcgggcggtgaagagtcacaggctgagatggacatttctagacttaag

SEQ ID NO: 64 - DNA, 3877 bp, Homo sapiens
gtcagtgtggaggagactgagtattctaccttgtaaatactgttatttgtatatactgtaaatgatgacatcggtgggcactaaccgagcccggggaaactgggaacaacctcaaaaccaaaaccagacacagcacaagcagcggccacaggccactgcagaacaaattagacttgcacagatgatttcggaccataatgatgctgactttgaggagaaggtgaaacaattgattgatattacaggcaagaaccaggatgaatgtgtgattgctttgcatgactgcaatggagatgtcaacagagctatcaatgttcttctggaaggaaacccagacacgcattcctgggagatggtcgggaagaagaagggagtctcaggccagaaggatggtggccagacggaatccaatgaggaaggcaaagaaaatcgagaccgggacagagactatagtcggcgacgtggtgggccaccaagacgggggagaggtgccagccgtggacgagagtttcgaggtcaggaaaatggattggatggcaccaagagtggagggccttctggaagaggaacagaaagaggcagaaggggccgtggccgaggcagaggtggctctggtaggcgaggaggaaggttttctgctcaaggaatgggaacctttaacccagctgattatgcagagccagccaatactgatgataactatggcaatagcagcggcaatacgtggaacaacactggccactttgaaccagatgatgggacgagtgcatggaggactgcaacagaggagtgggggactgaagattggaatgaagatctttctgagaccaagatcttcactgcctctaatgtgtcttcagtgcctctgcctgcggagaatgtgacaatcactgctggtcagagaattgaccttgctgttctgctggggaagacaccatctacaatggagaatgattcatctaatctggatccgtctcaggctccttctctggcccagcctctggtgttcagtaattcgaagcagactgccatatcacagcctgcttcagggaacacattttctcatcacagtatggtgagcatgttagggaaaggatttggtgatgtcggtgaagctaaaggcggcagtactacaggctcccagttcttggagcaattcaagactgcccaagccctggctcagttggcagctcagcattctcagtctggaagcaccaccacctcctcttgggacatgggctcgacgacacaatccccatcactggtgcagtatgatttgaagaacccaagtgattcagcagtgcacagcccctttacaaagcgccaggcttttaccccatcttcaaccatgatggaggtgttccttcaggagaagtcacctgcagtggctacctccacagctgcacctccacctccgtcttctcctctgccaagcaaatccacatcggctccacagatgtcgcctggatcttcagacaaccagtcctctagccctcagccggctcagcagaaactgaaacagcagaagaaaaaagcctccttgacttctaagattcctgctctggctgtggagatgcctggctcagcagatatctcagggctaaacctgcagtttggggcattgcagtttgggtcagagcctgtcctttctgattatgagtccacccccaccacgagcgcctcttcaagccaggctccaagtagcctgtataccagcacggccagtgaatcatcctctacaatttcatctaaccagagtcaggagtctggttatcagagcggcccaattcagtcgacaacctatacctcccaaaataatgctcagggccctctttatgaacagagatccacacagactcggcggtaccccagctccatctcttcatcaccccaaaaggacctgactcaggcaaagaatggcttcagttctgtgcaggccacgcagttacagaccacacaatctgttgaaggtgctacaggctctgcagtgaaatctgattcaccttccacttctagcatcccccctctcaatgaaacggtatctgcagcttccttactgacgacaaccaatcagcattcatcctccttgggtggcttgagccacagtgaggagattccaaatactaccaccacacaacacagcagcacgttatctacgcagcagaataccctttcatcatcaacatcttctgggcgcacttcgacatccactcttttgcacacaagtgtggagagtgaggcgaatctccattcttcctccagcactttttccaccacatccagcacagtctctgcacctcccccagtggtcagtgtctcctccagtctcaatagtggcagtagcctgggcctcagcctaggcagcaactccactgtcacagcctcgactcgaagctcagttgctacgacttcaggaaaagctcctcccaacctccctcctggggtcccgccgttgttgcctaatccgtatattatggctccagggctgttacatgcctacccgccacaagtatatggttatgatgacttgcagatgcttcagacaagatttccattggattactacagcatcccatttcccacacccactactccgctgactgggagggatggtagcctggccagcaacccttattctggtgacctcacaaagttcggccgtggggatgcctcctccccagccccggccacaaccttggcccaaccccaacagaaccagacgcagactcaccataccacgcagcagacattcctgaacccggcgctgcctcctggctacagttacaccagcctgccatactatacaggggtcccgggcctccccagcaccttccagtatgggcctgctgtgttccctgtggctcctacctcttccaagcagcatggtgtgaatgtcagtgtgaatgcatcggccacccctttccaacagccgagtggatatgggtctcatggatacaacactggtgtttcagtcacctccagtaacacgggcgtgccagatatctcgggttctgtgtactccaaaacccagcagtcctttgagaaacaaggttttcattccggtactcctgctgcttccttcaacttgccttcagccctaggaagtgggggccccatcaatccggccacagctgctgcctacccacctgccccctttatgcacattctgaccccccatcagcagccgcattctcagatccttcaccatcacctgcagcaggatggccagacgggcagcgggcaacgtagccagaccagctccatcccgcagaagccccagaccaacaagtctgcctacaacagctacagctggggggccaactgaggccctgaccctcttctcccggtcccatcttctgagagggcttctcagcctggaaactatggaaacagcatcaaagagaaaggaatgtggggggtttccgctgccccccacccccagcggcccaccccatgcctcagcttcatgtctgtcccattcctataccatccccaccctgttgtatgtattataggatttgtattttctccttttttttcccccttccattccttctcccctcttgcattcaagattatgaaactttgctatgggccctgcacttcctttgcttcctcctgttcaccctggtggtgtacggatgaggcggggaggtgggacccccaaacatatatcagcccaacagccctaagtctccttctttattattaggaaaacaacaacaacaacaaacaaaaaaatggcgtcatgaatatgaacagcattgtcagatgaattagttgaagtggttttttttttgttttttttttttttttgtactgtgtcctcaaatttaatggattaatgtgtcttgtatatataaaaagaaaacctcta

SEQ ID NO: 65 - DNA, 3418 bp, Homo sapiens
gggtcggcccgactaagtgacttaaactcccacctactcctggaataaggagtcaaagcccggataggcgcagtattctaccttgtaaatactgttatttgtatatactgtaaatgatgacatcggtgggcactaaccgagcccggggaaactgggaacaacctcaaaaccaaaaccagacacagcacaagcagcggccacaggccactgcagaacaaattagacttgcacagatgatttcggaccataatgatgctgactttgaggagaaggtgaaacaattgattgatattacaggcaagaaccaggatgaatgtgtgattgctttgcatgactgcaatggagatgtcaacagagctatcaatgttcttctggaaggaaacccagacacgcattcctgggagatggtcgggaagaagaagggagtctcaggccagaaggatggtggccagacggaatccaatgaggaaggcaaagaaaatcgagaccgggacagagactatagtcggcgacgtggtgggccaccaagacgggggagaggtgccagccgtggacgagagtttcgaggtcaggaaaatggattggatggcaccaagagtggagggccttctggaagaggaacagaaagaggcagaaggggccgtggccgaggcagaggtggctctggtaggcgaggaggaaggttttctgctcaaggaatgggaacctttaacccagctgattatgcagagccagccaatactgatgataactatggcaatagcagcggcaatacgtggaacaacactggccactttgaaccagatgatgggacgagtgcatggaggactgcaacagaggagtgggggactgaagattggaatgaagatctttctgagaccaagatcttcactgcctctaatgtgtcttcagtgcctctgcctgcggagaatgtgacaatcactgctggtcagagaattgaccttgctgttctgctggggaagacaccatctacaatggagaatgattcatctaatctggatccgtctcaggctccttctctggcccagcctctggtgttcagtaattcgaagcagactgccatatcacagcctgcttcagggaacacattttctcatcacagtatggtgagcatgttagggaaaggatttggtgatgtcggtgaagctaaaggcggcagtactacaggctcccagttcttggagcaattcaagactgcccaagccctggctcagttggcagctcagcattctcagtctggaagcaccaccacctcctcttgggacatgggctcgacgacacaatccccatcactggtgcagtatgatttgaagaacccaagtgattcagcagtgcacagcccctttacaaagcgccaggcttttaccccatcttcaaccatgatggaggtgttccttcaggagaagtcacctgcagtggctacctccacagctgcacctccacctccgtcttctcctctgccaagcaaatccacatcggctccacagatgtcgcctggatcttcagacaaccagtcctctagccctcagccggctcagcagaaactgaaacagcagaagaaaaaagcctccttgacttctaagattcctgctctggctgtggagatgcctggctcagcagatatctcagggctaaacctgcagtttggggcattgcagtttgggtcagagcctgtcctttctgattatgagtccacccccaccacgagcgcctcttcaagccaggctccaagtagcctgtataccagcacggccagtgaatcatcctctacaatttcatctaaccagagtcaggagtctggttatcagagcggcccaattcagtcgacaacctatacctcccaaaataatgctcagggccctctttatgaacagagatccacacagactcggcggtaccccagctccatctcttcatcaccccaaaaggacctgactcaggcaaagaatggcttcagttctgtgcaggccacgcagttacagaccacacaatctgttgaaggtgctacaggctctgcagtgaaatctgattcaccttccacttctagcatcccccctctcaatgaaacggtatctgcagcttccttactgacgacaaccaatcagcattcatcctccttgggtggcttgagccacagtgaggagattccaaatactaccaccacacaacacagcagcacgttatctacgcagcagaataccctttcatcatcaacatcttctgggcgcacttcgacatccactcttttgcacacaagtgtggagagtgaggcgaatctccattcttcctccagcactttttccaccacatccagcacagtctctgcacctcccccagtggtcagtgtctcctccagtctcaatagtggcagtagcctgggcctcagcctaggcagcaactccactgtcacagcctcgactcgaagctcagttgctacgacttcaggaaaagctcctcccaacctccctcctggggtcccgccgttgttgcctaatccgtatattatggctccagggctgttacatgcctacccgccacaagtatatggttatgatgacttgcagatgcttcagacaagatttccattggattactacagcatcccatttcccacacccactactccgctgactgggagggatggtagcctggccagcaacccttattctggtgacctcacaaagttcggccgtggggatgcctcctccccagccccggccacaaccttggcccaaccccaacagaaccagacgcagactcaccataccacgcagcagacattcctgaacccggcgctgcctcctggctacagttacaccagcctgccatactatacaggggtcccgggcctccccagcaccttccagtatgggcctgctgtgttccctgtggctcctacctcttccaagcagcatggtgtgaatgtcagtgtgaatgcatcggccacccctttccaacagccgagtggatatgggtctcatggatacaacactggaagaaaatatccacccccttacaagcatttctggacggctgagagctaatttggcccaaggctgggggctgtgttttgtgtgtgtgtataaatttgcactgaagtcttgtttcagaaaccagaccactgaggagagcctgctgagctgaggccatggcctgcgtggcttggggaaatgagttggtggataccttctgggcttttgaacttgcccctcccccatttccctctcccccatgtgtctgaccctgtcttacccatttcaagttcaagcggtgcagcaccttcgaagcatcaatgcacacacctgctgttgcttttgatttctggaaggcatgtagtttcaacttgtaacaaaaatatttgtagtcttcaataaactgtggtatttctttagctaac

SEQ ID NO: 66 - DNA, 3451 bp, Homo sapiens
aagtgggcgggggaaggcgcgagagcgagcgcgagagggaaaaggagggagggggtggggaagagggaatcttatatcacgtgacaggggcggcgcggcccggggtgtcagtgtggaggagactgagtattctaccttgtaaatactgttatttgtatatactgtaaatgatgacatcggtgggcactaaccgagcccggggaaactgggaacaacctcaaaaccaaaaccagacacagcacaagcagcggccacaggccactgcagaacaaattagacttgcacagatgatttcggaccataatgatgctgactttgaggagaaggtgaaacaattgattgatattacaggcaagaaccaggatgaatgtgtgattgctttgcatgactgcaatggagatgtcaacagagctatcaatgttcttctggaaggaaacccagacacgcattcctgggagatggtcgggaagaagaagggagtctcaggccagaaggatggtggccagacggaatccaatgaggaaggcaaagaaaatcgagaccgggacagagactatagtcggcgacgtggtgggccaccaagacgggggagagttcgaggtcaggaaaatggattggatggcaccaagagtggagggccttctggaagaggaacagaaagaggcagaaggggccgtggccgaggcagaggtggctctggtaggcgaggaggaaggttttctgctcaaggaatgggaacctttaacccagctgattatgcagagccagccaatactgatgataactatggcaatagcagcggcaatacgtggaacaacactggccactttgaaccagatgatgggacgagtgcatggaggactgcaacagaggagtgggggactgaagattggaatgaagatctttctgagaccaagatcttcactgcctctaatgtgtcttcagtgcctctgcctgcggagaatgtgacaatcactgctggtcagagaattgaccttgctgttctgctggggaagacaccatctacaatggagaatgattcatctaatctggatccgtctcaggctccttctctggcccagcctctggtgttcagtaattcgaagcagactgccatatcacagcctgcttcagggaacacattttctcatcacagtatggtgagcatgttagggaaaggatttggtgatgtcggtgaagctaaaggcggcagtactacaggctcccagttcttggagcaattcaagactgcccaagccctggctcagttggcagctcagcattctcagtctggaagcaccaccacctcctcttgggacatgggctcgacgacacaatccccatcactggtgcagtatgatttgaagaacccaagtgattcagcagtgcacagcccctttacaaagcgccaggcttttaccccatcttcaaccatgatggaggtgttccttcaggagaagtcacctgcagtggctacctccacagctgcacctccacctccgtcttctcctctgccaagcaaatccacatcggctccacagatgtcgcctggatcttcagacaaccagtcctctagccctcagccggctcagcagaaactgaaacagcagaagaaaaaagcctccttgacttctaagattcctgctctggctgtggagatgcctggctcagcagatatctcagggctaaacctgcagtttggggcattgcagtttgggtcagagcctgtcctttctgattatgagtccacccccaccacgagcgcctcttcaagccaggctccaagtagcctgtataccagcacggccagtgaatcatcctctacaatttcatctaaccagagtcaggagtctggttatcagagcggcccaattcagtcgacaacctatacctcccaaaataatgctcagggccctctttatgaacagagatccacacagactcggcggtaccccagctccatctcttcatcaccccaaaaggacctgactcaggcaaagaatggcttcagttctgtgcaggccacgcagttacagaccacacaatctgttgaaggtgctacaggctctgcagtgaaatctgattcaccttccacttctagcatcccccctctcaatgaaacggtatctgcagcttccttactgacgacaaccaatcagcattcatcctccttgggtggcttgagccacagtgaggagattccaaatactaccaccacacaacacagcagcacgttatctacgcagcagaataccctttcatcatcaacatcttctgggcgcacttcgacatccactcttttgcacacaagtgtggagagtgaggcgaatctccattcttcctccagcactttttccaccacatccagcacagtctctgcacctcccccagtggtcagtgtctcctccagtctcaatagtggcagtagcctgggcctcagcctaggcagcaactccactgtcacagcctcgactcgaagctcagttgctacgacttcaggaaaagctcctcccaacctccctcctggggtcccgccgttgttgcctaatccgtatattatggctccagggctgttacatgcctacccgccacaagtatatggttatgatgacttgcagatgcttcagacaagatttccattggattactacagcatcccatttcccacacccactactccgctgactgggagggatggtagcctggccagcaacccttattctggtgacctcacaaagttcggccgtggggatgcctcctccccagccccggccacaaccttggcccaaccccaacagaaccagacgcagactcaccataccacgcagcagacattcctgaacccggcgctgcctcctggctacagttacaccagcctgccatactatacaggggtcccgggcctccccagcaccttccagtatgggcctgctgtgttccctgtggctcctacctcttccaagcagcatggtgtgaatgtcagtgtgaatgcatcggccacccctttccaacagccgagtggatatgggtctcatggatacaacactggaagaaaatatccacccccttacaagcatttctggacggctgagagctaatttggcccaaggctgggggctgtgttttgtgtgtgtgtataaatttgcactgaagtcttgtttcagaaaccagaccactgaggagagcctgctgagctgaggccatggcctgcgtggcttggggaaatgagttggtggataccttctgggcttttgaacttgcccctcccccatttccctctcccccatgtgtctgaccctgtcttacccatttcaagttcaagcggtgcagcaccttcgaagcatcaatgcacacacctgctgttgcttttgatttctggaaggcatgtagtttcaacttgtaacaaaaatatttgtagtcttcaataaactgtggtatttctttagctaac

SEQ ID NO: 67 - DNA, 3999 bp, Homo sapiens
aagtgggcgggggaaggcgcgagagcgagcgcgagagggaaaaggagggagggggtggggaagagggaatcttatatcacgtgacaggggcggcgcggcccggggtgtcagtgtggaggagactgagtattctaccttgtaaatactgttatttgtatatactgtaaatgatgacatcggtgggcactaaccgagcccggggaaactgggaacaacctcaaaaccaaaaccagacacagcacaagcagcggccacaggccactgcagaacaaattagacttgcacagatgatttcggaccataatgatgctgactttgaggagaaggtgaaacaattgattgatattacaggcaagaaccaggatgaatgtgtgattgctttgcatgactgcaatggagatgtcaacagagctatcaatgttcttctggaaggaaacccagacacgcattcctgggagatggtcgggaagaagaagggagtctcaggccagaaggatggtggccagacggaatccaatgaggaaggcaaagaaaatcgagaccgggacagagactatagtcggcgacgtggtgggccaccaagacgggggagaggtgccagccgtggacgagagtgtatgcatggggctttatcaaaaccagctgtggttcgaggtcaggaaaatggattggatggcaccaagagtggagggccttctggaagaggaacagaaagaggcagaaggggccgtggccgaggcagaggtggctctggtaggcgaggaggaaggttttctgctcaaggaatgggaacctttaacccagctgattatgcagagccagccaatactgatgataactatggcaatagcagcggcaatacgtggaacaacactggccactttgaaccagatgatgggacgagtgcatggaggactgcaacagaggagtgggggactgaagattggaatgaagatctttctgagaccaagatcttcactgcctctaatgtgtcttcagtgcctctgcctgcggagaatgtgacaatcactgctggtcagagaattgaccttgctgttctgctggggaagacaccatctacaatggagaatgattcatctaatctggatccgtctcaggctccttctctggcccagcctctggtgttcagtaattcgaagcagactgccatatcacagcctgcttcagggaacacattttctcatcacagtatggtgagcatgttagggaaaggatttggtgatgtcggtgaagctaaaggcggcagtactacaggctcccagttcttggagcaattcaagactgcccaagccctggctcagttggcagctcagcattctcagtctggaagcaccaccacctcctcttgggacatgggctcgacgacacaatccccatcactggtgcagtatgatttgaagaacccaagtgattcagcagtgcacagcccctttacaaagcgccaggcttttaccccatcttcaaccatgatggaggtgttccttcaggagaagtcacctgcagtggctacctccacagctgcacctccacctccgtcttctcctctgccaagcaaatccacatcggctccacagatgtcgcctggatcttcagacaaccagtcctctagccctcagccggctcagcagaaactgaaacagcagaagaaaaaagcctccttgacttctaagattcctgctctggctgtggagatgcctggctcagcagatatctcagggctaaacctgcagtttggggcattgcagtttgggtcagagcctgtcctttctgattatgagtccacccccaccacgagcgcctcttcaagccaggctccaagtagcctgtataccagcacggccagtgaatcatcctctacaatttcatctaaccagagtcaggagtctggttatcagagcggcccaattcagtcgacaacctatacctcccaaaataatgctcagggccctctttatgaacagagatccacacagactcggcggtaccccagctccatctcttcatcaccccaaaaggacctgactcaggcaaagaatggcttcagttctgtgcaggccacgcagttacagaccacacaatctgttgaaggtgctacaggctctgcagtgaaatctgattcaccttccacttctagcatcccccctctcaatgaaacggtatctgcagcttccttactgacgacaaccaatcagcattcatcctccttgggtggcttgagccacagtgaggagattccaaatactaccaccacacaacacagcagcacgttatctacgcagcagaataccctttcatcatcaacatcttctgggcgcacttcgacatccactcttttgcacacaagtgtggagagtgaggcgaatctccattcttcctccagcactttttccaccacatccagcacagtctctgcacctcccccagtggtcagtgtctcctccagtctcaatagtggcagtagcctgggcctcagcctaggcagcaactccactgtcacagcctcgactcgaagctcagttgctacgacttcaggaaaagctcctcccaacctccctcctggggtcccgccgttgttgcctaatccgtatattatggctccagggctgttacatgcctacccgccacaagtatatggttatgatgacttgcagatgcttcagacaagatttccattggattactacagcatcccatttcccacacccactactccgctgactgggagggatggtagcctggccagcaacccttattctggtgacctcacaaagttcggccgtggggatgcctcctccccagccccggccacaaccttggcccaaccccaacagaaccagacgcagactcaccataccacgcagcagacattcctgaacccggcgctgcctcctggctacagttacaccagcctgccatactatacaggggtcccgggcctccccagcaccttccagtatgggcctgctgtgttccctgtggctcctacctcttccaagcagcatggtgtgaatgtcagtgtgaatgcatcggccacccctttccaacagccgagtggatatgggtctcatggatacaacactggtgtttcagtcacctccagtaacacgggcgtgccagatatctcgggttctgtgtactccaaaacccagtcctttgagaaacaaggttttcattccggtactcctgctgcttccttcaacttgccttcagccctaggaagtgggggccccatcaatccggccacagctgctgcctacccacctgccccctttatgcacattctgaccccccatcagcagccgcattctcagatccttcaccatcacctgcagcaggatggccaggacatcctcaatttcgtcgatgaccagcttggtgaataagtattactgtaccaactgggcctcctctagcaggcccctgaaggcagtggaataaaatgaaatcttcgccctttaagaactcctgaccttaatgtggtagtagtatcttgtccttgaggggatttccttcccctcacccctaagactttcacaacctggtgactggaaagaaccaccacaaatcttcatttcctccagaaactgctacatctacagccgatttcaggcagtaaagggagagggatagaggagattgggtggaaaatggagaggatcaagaaggagctgagaccatttcaaagaaaaaaaatgctttatagagttttaagtatgacttagatgggtccaggcaaataaactaaaaagaagtgaaggcaacatgtatcgtctggcagaactaaatcttggagtggggtgagggatgaaagactacatattgggtacagtgtacactgctcgggtgatgggtgcgctaaagtcgcagaaatcactaaagaactcatccatgtaaccaaacaccacctgtaccccaaaaacgaaataaaaaaacaaaaccttggggcccattccccctaggaatggactactgtaaaaa

SEQ ID NO: 68 - protein, 1087 aa, Homo sapiens
MMTSVGTNRARGNWEQPQNQNQTQHKQRPQATAEQIRLAQMISDHNDADFEEKVKQLIDITGKNQDECVIALHDCNGDVNRAINVLLEGNPDTHSWEMVGKKKGVSGQKDGGQTESNEEGKENRDRDRDYSRRRGGPPRRGRGASRGREFRGQENGLDGTKSGGPSGRGTERGRRGRGRGRGGSGRRGGRFSAQGMGTFNPADYAEPANTDDNYGNSSGNTWNNTGHFEPDDGTSAWRTATEEWGTEDWNEDLSETKIFTASNVSSVPLPAENVTITAGQRIDLAVLLGKTPSTMENDSSNLDPSQAPSLAQPLVFSNSKQTAISQPASGNTFSHHSMVSMLGKGFGDVGEAKGGSTTGSQFLEQFKTAQALAQLAAQHSQSGSTTTSSWDMGSTTQSPSLVQYDLKNPSDSAVHSPFTKRQAFTPSSTMMEVFLQEKSPAVATSTAAPPPPSSPLPSKSTSAPQMSPGSSDNQSSSPQPAQQKLKQQKKKASLTSKIPALAVEMPGSADISGLNLQFGALQFGSEPVLSDYESTPTTSASSSQAPSSLYTSTASESSSTISSNQSQESGYQSGPIQSTTYTSQNNAQGPLYEQRSTQTRRYPSSISSSPQKDLTQAKNGFSSVQATQLQTTQSVEGATGSAVKSDSPSTSSIPPLNETVSAASLLTTTNQHSSSLGGLSHSEEIPNTTTTQHSSTLSTQQNTLSSSTSSGRTSTSTLLHTSVESEANLHSSSSTFSTTSSTVSAPPPVVSVSSSLNSGSSLGLSLGSNSTVTASTRSSVATTSGKAPPNLPPGVPPLLPNPYIMAPGLLHAYPPQVYGYDDLQMLQTRFPLDYYSIPFPTPTTPLTGRDGSLASNPYSGDLTKFGRGDASSPAPATTLAQPQQNQTQTHHTTQQTFLNPALPPGYSYTSLPYYTGVPGLPSTFQYGPAVFPVAPTSSKQHGVNVSVNASATPFQQPSGYGSHGYNTGVSVTSSNTGVPDISGSVYSKTQQSFEKQGFHSGTPAASFNLPSALGSGGPINPATAAAYPPAPFMHILTPHQQPHSQILHHHLQQDGQTGSGQRSQTSSIPQKPQTNKSAYNSYSWGAN

SEQ ID NO: 69 - protein, 983 aa, Homo sapiens
MMTSVGTNRARGNWEQPQNQNQTQHKQRPQATAEQIRLAQMISDHNDADFEEKVKQLIDITGKNQDECVIALHDCNGDVNRAINVLLEGNPDTHSWEMVGKKKGVSGQKDGGQTESNEEGKENRDRDRDYSRRRGGPPRRGRGASRGREFRGQENGLDGTKSGGPSGRGTERGRRGRGRGRGGSGRRGGRFSAQGMGTFNPADYAEPANTDDNYGNSSGNTWNNTGHFEPDDGTSAWRTATEEWGTEDWNEDLSETKIFTASNVSSVPLPAENVTITAGQRIDLAVLLGKTPSTMENDSSNLDPSQAPSLAQPLVFSNSKQTAISQPASGNTFSHHSMVSMLGKGFGDVGEAKGGSTTGSQFLEQFKTAQALAQLAAQHSQSGSTTTSSWDMGSTTQSPSLVQYDLKNPSDSAVHSPFTKRQAFTPSSTMMEVFLQEKSPAVATSTAAPPPPSSPLPSKSTSAPQMSPGSSDNQSSSPQPAQQKLKQQKKKASLTSKIPALAVEMPGSADISGLNLQFGALQFGSEPVLSDYESTPTTSASSSQAPSSLYTSTASESSSTISSNQSQESGYQSGPIQSTTYTSQNNAQGPLYEQRSTQTRRYPSSISSSPQKDLTQAKNGFSSVQATQLQTTQSVEGATGSAVKSDSPSTSSIPPLNETVSAASLLTTTNQHSSSLGGLSHSEEIPNTTTTQHSSTLSTQQNTLSSSTSSGRTSTSTLLHTSVESEANLHSSSSTFSTTSSTVSAPPPVVSVSSSLNSGSSLGLSLGSNSTVTASTRSSVATTSGKAPPNLPPGVPPLLPNPYIMAPGLLHAYPPQVYGYDDLQMLQTRFPLDYYSIPFPTPTTPLTGRDGSLASNPYSGDLTKFGRGDASSPAPATTLAQPQQNQTQTHHTTQQTFLNPALPPGYSYTSLPYYTGVPGLPSTFQYGPAVFPVAPTSSKQHGVNVSVNASATPFQQPSGYGSHGYNTGRKYPPPYKHFWTAES

SEQ ID NO: 70 - protein, 976 aa, Homo sapiens
MMTSVGTNRARGNWEQPQNQNQTQHKQRPQATAEQIRLAQMISDHNDADFEEKVKQLIDITGKNQDECVIALHDCNGDVNRAINVLLEGNPDTHSWEMVGKKKGVSGQKDGGQTESNEEGKENRDRDRDYSRRRGGPPRRGRVRGQENGLDGTKSGGPSGRGTERGRRGRGRGRGGSGRRGGRFSAQGMGTFNPADYAEPANTDDNYGNSSGNTWNNTGHFEPDDGTSAWRTATEEWGTEDWNEDLSETKIFTASNVSSVPLPAENVTITAGQRIDLAVLLGKTPSTMENDSSNLDPSQAPSLAQPLVFSNSKQTAISQPASGNTFSHHSMVSMLGKGFGDVGEAKGGSTTGSQFLEQFKTAQALAQLAAQHSQSGSTTTSSWDMGSTTQSPSLVQYDLKNPSDSAVHSPFTKRQAFTPSSTMMEVFLQEKSPAVATSTAAPPPPSSPLPSKSTSAPQMSPGSSDNQSSSPQPAQQKLKQQKKKASLTSKIPALAVEMPGSADISGLNLQFGALQFGSEPVLSDYESTPTTSASSSQAPSSLYTSTASESSSTISSNQSQESGYQSGPIQSTTYTSQNNAQGPLYEQRSTQTRRYPSSISSSPQKDLTQAKNGFSSVQATQLQTTQSVEGATGSAVKSDSPSTSSIPPLNETVSAASLLTTTNQHSSSLGGLSHSEEIPNTTTTQHSSTLSTQQNTLSSSTSSGRTSTSTLLHTSVESEANLHSSSSTFSTTSSTVSAPPPVVSVSSSLNSGSSLGLSLGSNSTVTASTRSSVATTSGKAPPNLPPGVPPLLPNPYIMAPGLLHAYPPQVYGYDDLQMLQTRFPLDYYSIPFPTPTTPLTGRDGSLASNPYSGDLTKFGRGDASSPAPATTLAQPQQNQTQTHHTTQQTFLNPALPPGYSYTSLPYYTGVPGLPSTFQYGPAVFPVAPTSSKQHGVNVSVNASATPFQQPSGYGSHGYNTGRKYPPPYKHFWTAES

SEQ ID NO: 71 - protein, 1078 aa, Homo sapiens
MMTSVGTNRARGNWEQPQNQNQTQHKQRPQATAEQIRLAQMISDHNDADFEEKVKQLIDITGKNQDECVIALHDCNGDVNRAINVLLEGNPDTHSWEMVGKKKGVSGQKDGGQTESNEEGKENRDRDRDYSRRRGGPPRRGRGASRGRECMHGALSKPAVVRGQENGLDGTKSGGPSGRGTERGRRGRGRGRGGSGRRGGRFSAQGMGTFNPADYAEPANTDDNYGNSSGNTWNNTGHFEPDDGTSAWRTATEEWGTEDWNEDLSETKIFTASNVSSVPLPAENVTITAGQRIDLAVLLGKTPSTMENDSSNLDPSQAPSLAQPLVFSNSKQTAISQPASGNTFSHHSMVSMLGKGFGDVGEAKGGSTTGSQFLEQFKTAQALAQLAAQHSQSGSTTTSSWDMGSTTQSPSLVQYDLKNPSDSAVHSPFTKRQAFTPSSTMMEVFLQEKSPAVATSTAAPPPPSSPLPSKSTSAPQMSPGSSDNQSSSPQPAQQKLKQQKKKASLTSKIPALAVEMPGSADISGLNLQFGALQFGSEPVLSDYESTPTTSASSSQAPSSLYTSTASESSSTISSNQSQESGYQSGPIQSTTYTSQNNAQGPLYEQRSTQTRRYPSSISSSPQKDLTQAKNGFSSVQATQLQTTQSVEGATGSAVKSDSPSTSSIPPLNETVSAASLLTTTNQHSSSLGGLSHSEEIPNTTTTQHSSTLSTQQNTLSSSTSSGRTSTSTLLHTSVESEANLHSSSSTFSTTSSTVSAPPPVVSVSSSLNSGSSLGLSLGSNSTVTASTRSSVATTSGKAPPNLPPGVPPLLPNPYIMAPGLLHAYPPQVYGYDDLQMLQTRFPLDYYSIPFPTPTTPLTGRDGSLASNPYSGDLTKFGRGDASSPAPATTLAQPQQNQTQTHHTTQQTFLNPALPPGYSYTSLPYYTGVPGLPSTFQYGPAVFPVAPTSSKQHGVNVSVNASATPFQQPSGYGSHGYNTGVSVTSSNTGVPDISGSVYSKTQSFEKQGFHSGTPAASFNLPSALGSGGPINPATAAAYPPAPFMHILTPHQQPHSQILHHHLQQDGQDILNFVDDQLGE

SEQ ID NO: 72 - DNA, 7461 bp, Artificial Sequence
  Description of Artificial Sequence: Synthetic polynucleotide
atgggtaagcctatccctaaccctctcctcggtctcgattctacggctagcatggacaagaagtacagcatcggcctggccatcggcaccaactctgtgggctgggccgtgatcaccgacgagtacaaggtgcccagcaagaaattcaaggtgctgggcaacaccgaccggcacagcatcaagaagaacctgatcggcgccctgctgttcgacagcggagaaacagccgaggccacccggctgaagagaaccgccagaagaagatacaccagacggaagaaccggatctgctatctgcaagagatcttcagcaacgagatggccaaggtggacgacagcttcttccacagactggaagagtccttcctggtggaagaggataagaagcacgagcggcaccccatcttcggcaacatcgtggacgaggtggcctaccacgagaagtaccccaccatctaccacctgagaaagaaactggtggacagcaccgacaaggccgacctgcggctgatctatctggccctggcccacatgatcaagttccggggccacttcctgatcgagggcgacctgaaccccgacaacagcgacgtggacaagctgttcatccagctggtgcagacctacaaccagctgttcgaggaaaaccccatcaacgccagcggcgtggacgccaaggccatcctgtctgccagactgagcaagagcagacggctggaaaatctgatcgcccagctgcccggcgagaagaagaatggcctgttcggcaacctgattgccctgagcctgggcctgacccccaacttcaagagcaacttcgacctggccgaggatgccaaactgcagctgagcaaggacacctacgacgacgacctggacaacctgctggcccagatcggcgaccagtacgccgacctgtttctggccgccaagaacctgtccgacgccatcctgctgagcgacatcctgagagtgaacaccgagatcaccaaggcccccctgagcgcctctatgatcaagagatacgacgagcaccaccaggacctgaccctgctgaaagctctcgtgcggcagcagctgcctgagaagtacaaagagattttcttcgaccagagcaagaacggctacgccggctacatcgatggcggagccagccaggaagagttctacaagttcatcaagcccatcctggaaaagatggacggcaccgaggaactgctcgtgaagctgaacagagaggacctgctgcggaagcagcggaccttcgacaacggcagcatcccccaccagatccacctgggagagctgcacgccattctgcggcggcaggaagatttttacccattcctgaaggacaaccgggaaaagatcgagaagatcctgaccttccgcatcccctactacgtgggccctctggccaggggaaacagcagattcgcctggatgaccagaaagagcgaggaaaccatcaccccctggaacttcgaggaagtggtggacaagggcgccagcgcccagagcttcatcgagcggatgaccaacttcgataagaacctgcccaacgagaaggtgctgcccaagcacagcctgctgtacgagtacttcaccgtgtacaacgagctgaccaaagtgaaatacgtgaccgagggaatgagaaagcccgccttcctgagcggcgagcagaaaaaagccatcgtggacctgctgttcaagaccaaccggaaagtgaccgtgaagcagctgaaagaggactacttcaagaaaatcgagtgcttcgactccgtggaaatctccggcgtggaagatcggttcaacgcctccctgggcacataccacgatctgctgaaaattatcaaggacaaggacttcctggacaatgaggaaaacgaggacattctggaagatatcgtgctgaccctgacactgtttgaggacagagagatgatcgaggaacggctgaaaacctatgcccacctgttcgacgacaaagtgatgaagcagctgaagcggcggagatacaccggctggggcaggctgagccggaagctgatcaacggcatccgggacaagcagtccggcaagacaatcctggatttcctgaagtccgacggcttcgccaacagaaacttcatgcagctgatccacgacgacagcctgacctttaaagaggacatccagaaagcccaggtgtccggccagggcgatagcctgcacgagcacattgccaatctggccggcagccccgccattaagaagggcatcctgcagacagtgaaggtggtggacgagctcgtgaaagtgatgggccggcacaagcccgagaacatcgtgatcgaaatggccagagagaaccagaccacccagaagggacagaagaacagccgcgagagaatgaagcggatcgaagagggcatcaaagagctgggcagccagatcctgaaagaacaccccgtggaaaacacccagctgcagaacgagaagctgtacctgtactacctgcagaatgggcgggatatgtacgtggaccaggaactggacatcaaccggctgtccgactacgatgtggacgctatcgtgcctcagagctttctgaaggacgactccatcgataacaaagtgctgactcggagcgacaagaaccggggcaagagcgacaacgtgccctccgaagaggtcgtgaagaagatgaagaactactggcgccagctgctgaatgccaagctgattacccagaggaagttcgacaatctgaccaaggccgagagaggcggcctgagcgaactggataaggccggcttcatcaagagacagctggtggaaacccggcagatcacaaagcacgtggcacagatcctggactcccggatgaacactaagtacgacgagaacgacaaactgatccgggaagtgaaagtgatcaccctgaagtccaagctggtgtccgatttccggaaggatttccagttttacaaagtgcgcgagatcaacaactaccaccacgcccacgacgcctacctgaacgccgtcgtgggaaccgccctgatcaaaaagtaccctaagctggaaagcgagttcgtgtacggcgactacaaggtgtacgacgtgcggaagatgatcgccaagagcgagcaggaaatcggcaaggctaccgccaagtacttcttctacagcaacatcatgaactttttcaagaccgagattaccctggccaacggcgagatccggaagcggcctctgatcgagacaaacggcgaaacaggcgagatcgtgtgggataagggccgggactttgccaccgtgcggaaagtgctgtctatgccccaagtgaatatcgtgaaaaagaccgaggtgcagacaggcggcttcagcaaagagtctatcctgcccaagaggaacagcgacaagctgatcgccagaaagaaggactgggaccctaagaagtacggcggcttcgacagccccaccgtggcctattctgtgctggtggtggccaaagtggaaaagggcaagtccaagaaactgaagagtgtgaaagagctgctggggatcaccatcatggaaagaagcagcttcgagaagaatcccatcgactttctggaagccaagggctacaaagaagtgaaaaaggacctgatcatcaagctgcctaagtactccctgttcgagctggaaaacggccggaagagaatgctggcctctgccggcgaactgcagaagggaaacgaactggccctgccctccaaatatgtgaacttcctgtacctggccagccactatgagaagctgaagggctcccccgaggataatgagcagaaacagctgtttgtggaacagcacaaacactacctggacgagatcatcgagcagatcagcgagttctccaagagagtgatcctggccgacgctaatctggacaaggtgctgagcgcctacaacaagcacagagacaagcctatcagagagcaggccgagaatatcatccacctgtttaccctgaccaatctgggagcccctgccgccttcaagtactttgacaccaccatcgaccggaagaggtacaccagcaccaaagaggtgctggacgccaccctgatccaccagagcatcaccggcctgtacgagacacggatcgacctgtctcagctgggaggcgacctcgagggcggatccggtggttccggaggagctgtcgacacatcggtgggcactaaccgagcccggggaaactgggaacaacctcaaaaccaaaaccagacacagcacaagcagcggccacaggccactgcagaacaaattagacttgcacagatgatttcggaccataatgatgctgactttgaggagaaggtgaaacaattgattgatattacaggcaagaaccaggatgaatgtgtgattgctttgcatgactgcaatggagatgtcaacagagctatcaatgttcttctggaaggaaacccagacacgcattcctgggagatggtcgggaagaagaagggagtctcaggccagaaggatggtggccagacggaatccaatgaggaaggcaaagaaaatcgagaccgggacagagactatagtcggcgacgtggtgggccaccaagacgggggagaggtgccagccgtggacgagagtttcgaggtcaggaaaatggattggatggcaccaagagtggagggccttctggaagaggaacagaaagaggcagaaggggccgtggccgaggcagaggtggctctggtaggcgaggaggaaggttttctgctcaaggaatgggaacctttaacccagctgattatgcagagccagccaatactgatgataactatggcaatagcagcggcaatacgtggaacaacactggccactttgaaccagatgatgggacgagtgcatggaggactgcaacagaggagtgggggactgaagattggaatgaagatctttctgagaccaagatcttcactgcctctaatgtgtcttcagtgcctctgcctgcggagaatgtgacaatcactgctggtcagagaattgaccttgctgttctgctggggaagacaccatctacaatggagaatgattcatctaatctggatccgtctcaggctccttctctggcccagcctctggtgttcagtaattcgaagcagactgccatatcacagcctgcttcagggaacacattttctcatcacagtatggtgagcatgttagggaaaggatttggtgatgtcggtgaagctaaaggcggcagtactacaggctcccagttcttggagcaattcaagactgcccaagccctggctcagttggcagctcagcattctcagtctggaagcaccaccacctcctcttgggacatgggctcgacgacacaatccccatcactggtgcagtatgatttgaagaacccaagtgattcagcagtgcacagcccctttacaaagcgccaggcttttaccccatcttcaaccatgatggaggtgttccttcaggagaagtcacctgcagtggctacctccacagctgcacctccacctccgtcttctcctctgccaagcaaatccacatcggctccacagatgtcgcctggatcttcagacaaccagtcctctagccctcagccggctcagcagaaactgaaacagcagaagaaaaaagcctccttgacttctaagattcctgctctggctgtggagatgcctggctcagcagatatctcagggctaaacctgcagtttggggcattgcagtttgggtcagagcctgtcctttctgattatgagtccacccccaccacgagcgcctcttcaagccaggctccaagtagcctgtataccagcacggccagtgaatcatcctctacaatttcatctaaccagagtcaggagtctggttatcagagcggcccaattcagtcgacaacctatacctcccaaaataatgctcagggccctctttatgaacagagatccacacagactcggcggtaccccagctccatctcttcatcaccccaaaaggacctgactcaggcaaagaatggcttcagttctgtgcaggccacgcagttacagaccacacaatctgttgaaggtgctacaggctctgcagtgaaatctgattcaccttccacttctagcatcccccctctcaatgaaacggtatctgcagcttccttactgacgacaaccaatcagcattcatcctccttgggtggcttgagccacagtgaggagattccaaatactaccaccacacaacacagcagcacgttatctacgcagcagaataccctttcatcatcaacatcttctgggcgcacttcgacatccactcttttgcacacaagtgtggagagtgaggcgaatctccattcttcctccagcactttttccaccacatccagcacagtctctgcacctcccccagtggtcagtgtctcctccagtctcaatagtggcagtagcctgggcctcagcctaggcagcaactccactgtcacagcctcgactcgaagctcagttgctacgacttcaggaaaagctcctcccaacctccctcctggggtcccgccgttgttgcctaatccgtatattatggctccagggctgttacatgcctacccgccacaagtatatggttatgatgacttgcagatgcttcagacaagatttccattggattactacagcatcccatttcccacacccactactccgctgactgggagggatggtagcctggccagcaacccttattctggtgacctcacaaagttcggccgtggggatgcctcctccccagccccggccacaaccttggcccaaccccaacagaaccagacgcagactcaccataccacgcagcagacattcctgaacccggcgctgcctcctggctacagttacaccagcctgccatactatacaggggtcccgggcctccccagcaccttccagtatgggcctgctgtgttccctgtggctcctacctcttccaagcagcatggtgtgaatgtcagtgtgaatgcatcggccacccctttccaacagccgagtggatatgggtctcatggatacaacactggtgtttcagtcacctccagtaacacgggcgtgccagatatctcgggttctgtgtactccaaaacccagcagtcctttgagaaacaaggttttcattccggtactcctgctgcttccttcaacttgccttcagccctaggaagtgggggccccatcaatccggccacagctgctgcctacccacctgccccctttatgcacattctgaccccccatcagcagccgcattctcagatccttcaccatcacctgcagcaggatggccagacgggcagcgggcaacgtagccagaccagctccatcccgcagaagccccagaccaacaagtctgcctacaacagctacagctggggggccaactctagacttaag

SEQ ID NO: 73 - protein, 14 aa, Artificial Sequence
  Description of Artificial Sequence: Synthetic peptide
GKPIPNPLLGLDST

SEQ ID NO: 74 - protein, 1368 aa, Artificial Sequence; identical to SEQ ID NO: 24
  Description of Artificial Sequence: Synthetic polypeptide

SEQ ID NO: 75 - protein, 37 aa, Artificial Sequence
  Description of Artificial Sequence: Synthetic polypeptide
MVSKGGSSDDEATADSQHAAPPKKKRKVGDPRVPVAT

SEQ ID NO: 76 - DNA, 11559 bp, Artificial Sequence
  Description of Artificial Sequence: Synthetic polynucleotide
actcttcctttttcaatattattgaagcatttatcagggttattgtctcatgagcggatacatatttgaatgtatttagaaaaataaacaaataggggttccgcgcacatttccccgaaaagtgccacctaaattgtaagcgttaatattttgttaaaattcgcgttaaatttttgttaaatcagctcattttttaaccaataggccgaaatcggcaaaatcccttataaatcaaaagaatagaccgagatagggttgagtgttgttccagtttggaacaagagtccactattaaagaacgtggactccaacgtcaaagggcgaaaaaccgtctatcagggcgatggcccactacgtgaaccatcaccctaatcaagttttttggggtcgaggtgccgtaaagcactaaatcggaaccctaaagggagcccccgatttagagcttgacggggaaagccggcgaacgtggcgagaaaggaagggaagaaagcgaaaggagcgggcgctagggcgctggcaagtgtagcggtcacgctgcgcgtaaccaccacacccgccgcgcttaatgcgccgctacagggcgcgtcccattcgccattcaggctgcgcaactgttgggaagggcgatcggtgcgggcctcttcgctattacgccagctggcgaaagggggatgtgctgcaaggcgattaagttgggtaacgccagggttttcccagtcacgacgttgtaaaacgacggccagtgagcgcgcctcgttcattcacgtttttgaacccgtggaggacgggcagactcgcggtgcaaatgtgttttacagcgtgatggagcagatgaagatgctcgacacgctgcagaacacgcagctagattaaccctagaaagataatcatattgtgacgtacgttaaagataatcatgtgtaaaattgacgcatgtgttttatcggtctgtatatcgaggtttatttattaatttgaatagatattaagttttattatatttacacttacatactaataataaattcaacaaacaatttatttatgtttatttatttattaaaaaaaacaaaaactcaaaatttcttctataaagtaacaaaacttttatgagggacagcccccccccaaagcccccagggatgtaattacgtccctcccccgctagggggcagcagcgagccgcccggggctccgctccggtccggcgctccccccgcatccccgagccggcagcgtgcggggacagcccgggcacggggaaggtggcacgggatcgctttcctctgaacgcttctcgctgctctttgagcctgcagacacctggggggatacggggaaaaggcctccacggccactagttctaccgggtaggggaggcgcttttcccaaggcagtctggagcatgcgctttagcagccccgctgggcacttggcgctacacaagtggcctctggcctcgcacacattccacatccaccggtaggcgccaaccggctccgttctttggtggccccttcgcgccaccttctactcctcccctagtcaggaagttcccccccgccccgcagctcgcgtcgtgcaggacgtgacaaatggaagtagcacgtctcattagtctcgtgcagatggacagcaccgctgagcaatggaagcgggtaggcctttggggcagcggccaatagcagctttgctccttcgctttctgggctcagaggctgggaaggggtgggtccgggggcgggctcaggggcgggctcaggggcggggcgggcgcccgaaggtcctccggaggcccggcattctgcacgcttcaaaagcgcacgtctgccgcgctgttctcctcttcctcatctccgggcctttcgacctgcaggttaattaaatgggtaagcctatccctaaccctctcctcggtctcgattctacggctagcatggacaagaagtacagcatcggcctggccatcggcaccaactctgtgggctgggccgtgatcaccgacgagtacaaggtgcccagcaagaaattcaaggtgctgggcaacaccgaccggcacagcatcaagaagaacctgatcggcgccctgctgttcgacagcggagaaacagccgaggccacccggctgaagagaaccgccagaagaagatacaccagacggaagaaccggatctgctatctgcaagagatcttcagcaacgagatggccaaggtggacgacagcttcttccacagactggaagagtccttcctggtggaagaggataagaagcacgagcggcaccccatcttcggcaacatcgtggacgaggtggcctaccacgagaagtaccccaccatctaccacctgagaaagaaactggtggacagcaccgacaaggccgacctgcggctgatctatctggccctggcccacatgatcaagttccggggccacttcctgatcgagggcgacctgaaccccgacaacagcgacgtggacaagctgttcatccagctggtgcagacctacaaccagctgttcgaggaaaaccccatcaacgccagcggcgtggacgccaaggccatcctgtctgccagactgagcaagagcagacggctggaaaatctgatcgcccagctgcccggcgagaagaagaatggcctgttcggcaacctgattgccctgagcctgggcctgacccccaacttcaagagcaacttcgacctggccgaggatgccaaactgcagctgagcaaggacacctacgacgacgacctggacaacctgctggcccagatcggcgaccagtacgccgacctgtttctggccgccaagaacctgtccgacgccatcctgctgagcgacatcctgagagtgaacaccgagatcaccaaggcccccctgagcgcctctatgatcaagagatacgacgagcaccaccaggacctgaccctgctgaaagctctcgtgcggcagcagctgcctgagaagtacaaagagattttcttcgaccagagcaagaacggctacgccggctacatcgatggcggagccagccaggaagagttctacaagttcatcaagcccatcctggaaaagatggacggcaccgaggaactgctcgtgaagctgaacagagaggacctgctgcggaagcagcggaccttcgacaacggcagcatcccccaccagatccacctgggagagctgcacgccattctgcggcggcaggaagatttttacccattcctgaaggacaaccgggaaaagatcgagaagatcctgaccttccgcatcccctactacgtgggccctctggccaggggaaacagcagattcgcctggatgaccagaaagagcgaggaaaccatcaccccctggaacttcgaggaagtggtggacaagggcgccagcgcccagagcttcatcgagcggatgaccaacttcgataagaacctgcccaacgagaaggtgctgcccaagcacagcctgctgtacgagtacttcaccgtgtacaacgagctgaccaaagtgaaatacgtgaccgagggaatgagaaagcccgccttcctgagcggcgagcagaaaaaagccatcgtggacctgctgttcaagaccaaccggaaagtgaccgtgaagcagctgaaagaggactacttcaagaaaatcgagtgcttcgactccgtggaaatctccggcgtggaagatcggttcaacgcctccctgggcacataccacgatctgctgaaaattatcaaggacaaggacttcctggacaatgaggaaaacgaggacattctggaagatatcgtgctgaccctgacactgtttgaggacagagagatgatcgaggaacggctgaaaacctatgcccacctgttcgacgacaaagtgatgaagcagctgaagcggcggagatacaccggctggggcaggctgagccggaagctgatcaacggcatccgggacaagcagtccggcaagacaatcctggatttcctgaagtccgacggcttcgccaacagaaacttcatgcagctgatccacgacgacagcctgacctttaaagaggacatccagaaagcccaggtgtccggccagggcgatagcctgcacgagcacattgccaatctggccggcagccccgccattaagaagggcatcctgcagacagtgaaggtggtggacgagctcgtgaaagtgatgggccggcacaagcccgagaacatcgtgatcgaaatggccagagagaaccagaccacccagaagggacagaagaacagccgcgagagaatgaagcggatcgaagagggcatcaaagagctgggcagccagatcctgaaagaacaccccgtggaaaacacccagctgcagaacgagaagctgtacctgtactacctgcagaatgggcgggatatgtacgtggaccaggaactggacatcaaccggctgtccgactacgatgtggacgctatcgtgcctcagagctttctgaaggacgactccatcgataacaaagtgctgactcggagcgacaagaaccggggcaagagcgacaacgtgccctccgaagaggtcgtgaagaagatgaagaactactggcgccagctgctgaatgccaagctgattacccagaggaagttcgacaatctgaccaaggccgagagaggcggcctgagcgaactggataaggccggcttcatcaagagacagctggtggaaacccggcagatcacaaagcacgtggcacagatcctggactcccggatgaacactaagtacgacgagaacgacaaactgatccgggaagtgaaagtgatcaccctgaagtccaagctggtgtccgatttccggaaggatttccagttttacaaagtgcgcgagatcaacaactaccaccacgcccacgacgcctacctgaacgccgtcgtgggaaccgccctgatcaaaaagtaccctaagctggaaagcgagttcgtgtacggcgactacaaggtgtacgacgtgcggaagatgatcgccaagagcgagcaggaaatcggcaaggctaccgccaagtacttcttctacagcaacatcatgaactttttcaagaccgagattaccctggccaacggcgagatccggaagcggcctctgatcgagacaaacggcgaaacaggcgagatcgtgtgggataagggccgggactttgccaccgtgcggaaagtgctgtctatgccccaagtgaatatcgtgaaaaagaccgaggtgcagacaggcggcttcagcaaagagtctatcctgcccaagaggaacagcgacaagctgatcgccagaaagaaggactgggaccctaagaagtacggcggcttcgacagccccaccgtggcctattctgtgctggtggtggccaaagtggaaaagggcaagtccaagaaactgaagagtgtgaaagagctgctggggatcaccatcatggaaagaagcagcttcgagaagaatcccatcgactttctggaagccaagggctacaaagaagtgaaaaaggacctgatcatcaagctgcctaagtactccctgttcgagctggaaaacggccggaagagaatgctggcctctgccggcgaactgcagaagggaaacgaactggccctgccctccaaatatgtgaacttcctgtacctggccagccactatgagaagctgaagggctcccccgaggataatgagcagaaacagctgtttgtggaacagcacaaacactacctggacgagatcatcgagcagatcagcgagttctccaagagagtgatcctggccgacgctaatctggacaaggtgctgagcgcctacaacaagcacagagacaagcctatcagagagcaggccgagaatatcatccacctgtttaccctgaccaatctgggagcccctgccgccttcaagtactttgacaccaccatcgaccggaagaggtacaccagcaccaaagaggtgctggacgccaccctgatccaccagagcatcaccggcctgtacgagacacggatcgacctgtctcagctgggaggcgacctcgagggcggatccggtggttccggaggagctgtcgacatggcgactgtcgaaccggaaaccacccctactcctaatcccccgactacagaagaggagaaaacggaatctaatcaggaggttgctaacccagaacactatattaaacggcccctacagaacagatgggcactctggttttttaaaaatgataaaagcaaaacttggcaagcaaacctgcggctgatctccaagtttgatactgctgaagacttttttgctctgtacaaccatatccagttgtctagtaatttaatgcctggctgtgactactcactttttaaggatggtattgagcctatgtgggaagatgagaaaaacaaacggggaggacgatggctaattacattgaacaaacagcagagacgaagtgacctcgatcgcttttggctagagacacttctgtgccttattggagaatcttttgatgactacagtgatgatgtatgtggcgctgttgttaatgttagagctaaaggtgataagatagcaatatggactactgaatgtgaaaacagagaagctgttacacatatagggagggtatacaaggaaaggttaggacttcctccaaagatagtgattggttatcagtcccacgcagacacagctactaagagcggcgacaccactaaaaataggtttgttgtttctagacttaagtaagcctcgactgtgccttctagttgccagccatctgttgtttgcccctcccccgtgccttccttgaccctggaaggtgccactcccactgtcctttcctaataaaatgaggaaattgcatcgcattgtctgagtaggtgtcattctattctggggggtggggtggggcaggacagcaagggggaggattgggaagacaatagcaggcatgctggggagtgcccgtcagtgggcagagcgcacatcgcccacagtccccgagaagttggggggaggggtcggcaattgaacgggtgcctagagaaggtggcgcggggtaaactgggaaagtgatgtcgtgtactggctccgcctttttcccgagggtgggggagaaccgtatataagtgcagtagtcgccgtgaacgttctttttcgcaacgggtttgccgccagaacacagatggtctctaaaggaggttcgtccgacgacgaagcaacagcggactcgcagcacgccgcacctcctaagaagaaaaggaaggtaggggatccccgggtaccggtcgccaccatggtgagcaagggcgaggagctgttcaccggggtggtgcccatcctggtcgagctggacggcgacgtaaacggccacaagttcagcgtgtccggcgagggcgagggcgatgccacctacggcaagctgaccctgaagttcatctgcaccaccggcaagctgcccgtgccctggcccaccctcgtgaccaccctgtcctggggcgtgcagtgcttcgcccgctaccccgaccacatgaagcagcacgacttcttcaagtccgccatgcccgaaggctacgtccaggagcgcaccatcttcttcaaggacgacggcaactacaagacccgcgccgaggtgaagttcgagggcgacaccctggtgaaccgcatcgagctgaagggcatcgacttcaaggaggacggcaacatcctggggcacaagctggagtacaactactttagcgacaacgtctatatcaccgccgacaagcagaagaacggcatcaaggccaacttcaagatccgccacaacatcgaggacggcggcgtgcagctcgccgaccactaccagcagaacacccccatcggcgacggccccgtgctgctgcccgacaaccactacctgagcacccagtccaagctgagcaaagaccccaacgagaagcgcgatcacatggtcctgctggagttcgtgaccgccgccgggatcactctcggcatggacgagctgtacaagtaaaatcaacctctggattacaaaatttgtgaaagattgactggtattcttaactatgttgctccttttacgctatgtggatacgctgctttaatgcctttgtatcatgttaactaaacttgtttattgcagcttataatggttacaaataaagcaatagcatcacaaatttcacaaataaagcatttttttcactgcattctagttgtggtttgtccaaactcatcaatgtatcttatcatgtctggaattgactcaaatgatgtcaattagtctatcagaagctcatctggtctcccttccgggggacaagacatccctgtttaatatttaaacagcagtgttcccaaactgggttcttatatcccttgctctggtcaaccaggttgcagggtttcctgtcctcacaggaacgaagtccctaaagaaacagtggcagccaggtttagccccggaattgactggattccttttttagggcccattggtatggctttttccccgtatccccccaggtgtctgcaggctcaaagagcagcgagaagcgttcagaggaaagcgatcccgtgccaccttccccgtgcccgggctgtccccgcacgctgccggctcggggatgcggggggagcgccggaccggagcggagccccgggcggctcgctgctgccccctagcgggggagggacgtaattacatccctgggggctttgggggggggctgtccctgatatctataacaagaaaatatatatataataagttatcacgtaagtagaacatgaaataacaatataattatcgtatgagttaaatcttaaaagtcacgtaaaagataatcatgcgtcattttgactcacgcggtcgttatagttcaaaatcagtgacacttaccgcattgacaagcacgcctcacgggagctccaagcggcgactgagatgtcctaaatgcacagcgacggattcgcgctatttagaaagagagagcaatatttcaagaatgcatgcgtcaattttacgcagactatctttctagggttaatctagctgcatcaggatcatatcgtcgggtcttttttccggctcagtcatcgcccaagctggcgctatctgggcatcggggaggaagaagcccgtgccttttcccgcgaggttgaagcggcatggaaagagtttgccgaggatgactgctgctgcattgacgttgagcgaaaacgcacgtttaccatgatgattcgggaaggtgtggccatgcacgcctttaacggtgaactgttcgttcaggccacctgggataccagttcgtcgcggcttttccggacacagttccggatggtcagcccgaagcgcatcagcaacccgaacaataccggcgacagccggaactgccgtgccggtgtgcagattaatgacagcggtgcggcgctgggatattacgtcagcgaggacgggtatcctggctggatgccgcagaaatggacatggataccccgtgagttacccggcgggcgcgcttggcgtaatcatggtcatagctgtttcctgtgtgaaattgttatccgctcacaattccacacaacatacgagccggaagcataaagtgtaaagcctggggtgcctaatgagtgagctaactcacattaattgcgttgcgctcactgcccgctttccagtcgggaaacctgtcgtgccagctgcattaatgaatcggccaacgcgcggggagaggcggtttgcgtattgggcgctcttccgcttcctcgctcactgactcgctgcgctcggtcgttcggctgcggcgagcggtatcagctcactcaaaggcggtaatacggttatccacagaatcaggggataacgcaggaaagaacatgtgagcaaaaggccagcaaaaggccaggaaccgtaaaaaggccgcgttgctggcgtttttccataggctccgcccccctgacgagcatcacaaaaatcgacgctcaagtcagaggtggcgaaacccgacaggactataaagataccaggcgtttccccctggaagctccctcgtgcgctctcctgttccgaccctgccgcttaccggatacctgtccgcctttctcccttcgggaagcgtggcgctttctcatagctcacgctgtaggtatctcagttcggtgtaggtcgttcgctccaagctgggctgtgtgcacgaaccccccgttcagcccgaccgctgcgccttatccggtaactatcgtcttgagtccaacccggtaagacacgacttatcgccactggcagcagccactggtaacaggattagcagagcgaggtatgtaggcggtgctacagagttcttgaagtggtggcctaactacggctacactagaaggacagtatttggtatctgcgctctgctgaagccagttaccttcggaaaaagagttggtagctcttgatccggcaaacaaaccaccgctggtagcggtggtttttttgtttgcaagcagcagattacgcgcagaaaaaaaggatctcaagaagatcctttgatcttttctacggggtctgacgctcagtggaacgaaaactcacgttaagggattttggtcatgagattatcaaaaaggatcttcacctagatccttttaaattaaaaatgaagttttaaatcaatctaaagtatatatgagtaaacttggtctgacagttaccaatgcttaatcagtgaggcacctatctcagcgatctgtctatttcgttcatccatagttgcctgactccccgtcgtgtagataactacgatacgggagggcttaccatctggccccagtgctgcaatgataccgcgagacccacgctcaccggctccagatttatcagcaataaaccagccagccggaagggccgagcgcagaagtggtcctgcaactttatccgcctccatccagtctattaattgttgccgggaagctagagtaagtagttcgccagttaatagtttgcgcaacgttgttgccattgctacaggcatcgtggtgtcacgctcgtcgtttggtatggcttcattcagctccggttcccaacgatcaaggcgagttacatgatcccccatgttgtgcaaaaaagcggttagctccttcggtcctccgatcgttgtcagaagtaagttggccgcagtgttatcactcatggttatggcagcactgcataattctcttactgtcatgccatccgtaagatgcttttctgtgactggtgagtactcaaccaagtcattctgagaatagtgtatgcggcgaccgagttgctcttgcccggcgtcaatacgggataataccgcgccacatagcagaactttaaaagtgctcatcattggaaaacgttcttcggggcgaaaactctcaaggatcttaccgctgttgagatccagttcgatgtaacccactcgtgcacccaactgatcttcagcatcttttactttcaccagcgtttctgggtgagcaaaaacaggaaggcaaaatgccgcaaaaaagggaataagggcgacacggaaatgttgaatactcat

SEQ ID NO: 77 - protein, 118 aa, Artificial Sequence
  Description of Artificial Sequence: Synthetic polypeptide
MSGGSSCSQTPSAAAAATRRVVLGAGVQLPPGDYSTAPGGTLFSTAPGGTRIIYDRKFLMECRNAPVTKAPPRDLPTIPGVTSPSSDEPPMEASQSHLRNSPEDKRAGGEESQAEMDI

SEQ ID NO: 78 - DNA, 11262 bp, Artificial Sequence
  Description of Artificial Sequence: Synthetic polynucleotide
actcttcctttttcaatattattgaagcatttatcagggttattgtctcatgagcggatacatatttgaatgtatttagaaaaataaacaaataggggttccgcgcacatttccccgaaaagtgccacctaaattgtaagcgttaatattttgttaaaattcgcgttaaatttttgttaaatcagctcattttttaaccaataggccgaaatcggcaaaatcccttataaatcaaaagaatagaccgagatagggttgagtgttgttccagtttggaacaagagtccactattaaagaacgtggactccaacgtcaaagggcgaaaaaccgtctatcagggcgatggcccactacgtgaaccatcaccctaatcaagttttttggggtcgaggtgccgtaaagcactaaatcggaaccctaaagggagcccccgatttagagcttgacggggaaagccggcgaacgtggcgagaaaggaagggaagaaagcgaaaggagcgggcgctagggcgctggcaagtgtagcggtcacgctgcgcgtaaccaccacacccgccgcgcttaatgcgccgctacagggcgcgtcccattcgccattcaggctgcgcaactgttgggaagggcgatcggtgcgggcctcttcgctattacgccagctggcgaaagggggatgtgctgcaaggcgattaagttgggtaacgccagggttttcccagtcacgacgttgtaaaacgacggccagtgagcgcgcctcgttcattcacgtttttgaacccgtggaggacgggcagactcgcggtgcaaatgtgttttacagcgtgatggagcagatgaagatgctcgacacgctgcagaacacgcagctagattaaccctagaaagataatcatattgtgacgtacgttaaagataatcatgtgtaaaattgacgcatgtgttttatcggtctgtatatcgaggtttatttattaatttgaatagatattaagttttattatatttacacttacatactaataataaattcaacaaacaatttatttatgtttatttatttattaaaaaaaacaaaaactcaaaatttcttctataaagtaacaaaacttttatgagggacagcccccccccaaagcccccagggatgtaattacgtccctcccccgctagggggcagcagcgagccgcccggggctccgctccggtccggcgctccccccgcatccccgagccggcagcgtgcggggacagcccgggcacggggaaggtggcacgggatcgctttcctctgaacgcttctcgctgctctttgagcctgcagacacctggggggatacggggaaaaggcctccacggccactagttctaccgggtaggggaggcgcttttcccaaggcagtctggagcatgcgctttagcagccccgctgggcacttggcgctacacaagtggcctctggcctcgcacacattccacatccaccggtaggcgccaaccggctccgttctttggtggccccttcgcgccaccttctactcctcccctagtcaggaagttcccccccgccccgcagctcgcgtcgtgcaggacgtgacaaatggaagtagcacgtctcattagtctcgtgcagatggacagcaccgctgagcaatggaagcgggtaggcctttggggcagcggccaatagcagctttgctccttcgctttctgggctcagaggctgggaaggggtgggtccgggggcgggctcaggggcgggctcaggggcggggcgggcgcccgaaggtcctccggaggcccggcattctgcacgcttcaaaagcgcacgtctgccgcgctgttctcctcttcctcatctccgggcctttcgacctgcaggttaattaaatgggtaagcctatccctaaccctctcctcggtctcgattctacggctagcatggacaagaagtacagcatcggcctggccatcggcaccaactctgtgggctgggccgtgatcaccgacgagtacaaggtgcccagcaagaaattcaaggtgctgggcaacaccgaccggcacagcatcaagaagaacctgatcggcgccctgctgttcgacagcggagaaacagccgaggccacccggctgaagagaaccgccagaagaagatacaccagacggaagaaccggatctgctatctgcaagagatcttcagcaacgagatggccaaggtggacgacagcttcttccacagactggaagagtccttcctggtggaagaggataagaagcacgagcggcaccccatcttcggcaacatcgtggacgaggtggcctaccacgagaagtaccccaccatctaccacctgagaaagaaactggtggacagcaccgacaaggccgacctgcggctgatctatctggccctggcccacatgatcaagttccggggccacttcctgatcgagggcgacctgaaccccgacaacagcgacgtggacaagctgttcatccagctggtgcagacctacaaccagctgttcgaggaaaaccccatcaacgccagcggcgtggacgccaaggccatcctgtctgccagactgagcaagagcagacggctggaaaatctgatcgcccagctgcccggcgagaagaagaatggcctgttcggcaacctgattgccctgagcctgggcctgacccccaacttcaagagcaacttcgacctggccgaggatgccaaactgcagctgagcaaggacacctacgacgacgacctggacaacctgctggcccagatcggcgaccagtacgccgacctgtttctggccgccaagaacctgtccgacgccatcctgctgagcgacatcctgagagtgaacaccgagatcaccaaggcccccctgagcgcctctatgatcaagagatacgacgagcaccaccaggacctgaccctgctgaaagctctcgtgcggcagcagctgcctgagaagtacaaagagattttcttcgaccagagcaagaacggctacgccggctacatcgatggcggagccagccaggaagagttctacaagttcatcaagcccatcctggaaaagatggacggcaccgaggaactgctcgtgaagctgaacagagaggacctgctgcggaagcagcggaccttcgacaacggcagcatcccccaccagatccacctgggagagctgcacgccattctgcggcggcaggaagatttttacccattcctgaaggacaaccgggaaaagatcgagaagatcctgaccttccgcatcccctactacgtgggccctctggccaggggaaacagcagattcgcctggatgaccagaaagagcgaggaaaccatcaccccctggaacttcgaggaagtggtggacaagggcgccagcgcccagagcttcatcgagcggatgaccaacttcgataagaacctgcccaacgagaaggtgctgcccaagcacagcctgctgtacgagtacttcaccgtgtacaacgagctgaccaaagtgaaatacgtgaccgagggaatgagaaagcccgccttcctgagcggcgagcagaaaaaagccatcgtggacctgctgttcaagaccaaccggaaagtgaccgtgaagcagctgaaagaggactacttcaagaaaatcgagtgcttcgactccgtggaaatctccggcgtggaagatcggttcaacgcctccctgggcacataccacgatctgctgaaaattatcaaggacaaggacttcctggacaatgaggaaaacgaggacattctggaagatatcgtgctgaccctgacactgtttgaggacagagagatgatcgaggaacggctgaaaacctatgcccacctgttcgacgacaaagtgatgaagcagctgaagcggcggagatacaccggctggggcaggctgagccggaagctgatcaacggcatccgggacaagcagtccggcaagacaatcctggatttcctgaagtccgacggcttcgccaacagaaacttcatgcagctgatccacgacgacagcctgacctttaaagaggacatccagaaagcccaggtgtccggccagggcgatagcctgcacgagcacattgccaatctggccggcagccccgccattaagaagggcatcctgcagacagtgaaggtggtggacgagctcgtgaaagtgatgggccggcacaagcccgagaacatcgtgatcgaaatggccagagagaaccagaccacccagaagggacagaagaacagccgcgagagaatgaagcggatcgaagagggcatcaaagagctgggcagccagatcctgaaagaacaccccgtggaaaacacccagctgcagaacgagaagctgtacctgtactacctgcagaatgggcgggatatgtacgtggaccaggaactggacatcaaccggctgtccgactacgatgtggacgctatcgtgcctcagagctttctgaaggacgactccatcgataacaaagtgctgactcggagcgacaagaaccggggcaagagcgacaacgtgccctccgaagaggtcgtgaagaagatgaagaactactggcgccagctgctgaatgccaagctgattacccagaggaagttcgacaatctgaccaaggccgagagaggcggcctgagcgaactggataaggccggcttcatcaagagacagctggtggaaacccggcagatcacaaagcacgtggcacagatcctggactcccggatgaacactaagtacgacgagaacgacaaactgatccgggaagtgaaagtgatcaccctgaagtccaagctggtgtccgatttccggaaggatttccagttttacaaagtgcgcgagatcaacaactaccaccacgcccacgacgcctacctgaacgccgtcgtgggaaccgccctgatcaaaaagtaccctaagctggaaagcgagttcgtgtacggcgactacaaggtgtacgacgtgcggaagatgatcgccaagagcgagcaggaaatcggcaaggctaccgccaagtacttcttctacagcaacatcatgaactttttcaagaccgagattaccctggccaacggcgagatccggaagcggcctctgatcgagacaaacggcgaaacaggcgagatcgtgtgggataagggccgggactttgccaccgtgcggaaagtgctgtctatgccccaagtgaatatcgtgaaaaagaccgaggtgcagacaggcggcttcagcaaagagtctatcctgcccaagaggaacagcgacaagctgatcgccagaaagaaggactgggaccctaagaagtacggcggcttcgacagccccaccgtggcctattctgtgctggtggtggccaaagtggaaaagggcaagtccaagaaactgaagagtgtgaaagagctgctggggatcaccatcatggaaagaagcagcttcgagaagaatcccatcgactttctggaagccaagggctacaaagaagtgaaaaaggacctgatcatcaagctgcctaagtactccctgttcgagctggaaaacggccggaagagaatgctggcctctgccggcgaactgcagaagggaaacgaactggccctgccctccaaatatgtgaacttcctgtacctggccagccactatgagaagctgaagggctcccccgaggataatgagcagaaacagctgtttgtggaacagcacaaacactacctggacgagatcatcgagcagatcagcgagttctccaagagagtgatcctggccgacgctaatctggacaaggtgctgagcgcctacaacaagcacagagacaagcctatcagagagcaggccgagaatatcatccacctgtttaccctgaccaatctgggagcccctgccgccttcaagtactttgacaccaccatcgaccggaagaggtacaccagcaccaaagaggtgctggacgccaccctgatccaccagagcatcaccggcctgtacgagacacggatcgacctgtctcagctgggaggcgacctcgagggcggatccggtggttccggaggagctgtcgacatgtccgggggcagcagctgcagccagaccccaagcgctgccgcagccgccactcgccgggtggtgctcggcgccggcgtgcagctcccgcccggggactacagcacggcccccggcggcacgctcttcagcaccgccccgggaggtaccaggatcatctatgaccggaaattcctgatggagtgtcggaacgcacctgtgaccaaagcacccccaagggatctgcccaccattccgggggtcaccagcccttccagtgatgagccccccatggaagccagccagagccacctgcgcaatagcccagaagataagcgggcgggcggtgaagagtcacaggctgagatggacatttctagacttaagtaagcctcgactgtgccttctagttgccagccatctgttgtttgcccctcccccgtgccttccttgaccctggaaggtgccactcccactgtcctttcctaataaaatgaggaaattgcatcgcattgtctgagtaggtgtcattctattctggggggtggggtggggcaggacagcaagggggaggattgggaagacaatagcaggcatgctggggagtgcccgtcagtgggcagagcgcacatcgcccacagtccccgagaagttggggggaggggtcggcaattgaacgggtgcctagagaaggtggcgcggggtaaactgggaaagtgatgtcgtgtactggctccgcctttttcccgagggtgggggagaaccgtatataagtgcagtagtcgccgtgaacgttctttttcgcaacgggtttgccgccagaacacagatggtctctaaaggaggttcgtccgacgacgaagcaacagcggactcgcagcacgccgcacctcctaagaagaaaaggaaggtaggggatccccgggtaccggtcgccaccatggtgagcaagggcgaggagctgttcaccggggtggtgcccatcctggtcgagctggacggcgacgtaaacggccacaagttcagcgtgtccggcgagggcgagggcgatgccacctacggcaagctgaccctgaagttcatctgcaccaccggcaagctgcccgtgccctggcccaccctcgtgaccaccctgtcctggggcgtgcagtgcttcgcccgctaccccgaccacatgaagcagcacgacttcttcaagtccgccatgcccgaaggctacgtccaggagcgcaccatcttcttcaaggacgacggcaactacaagacccgcgccgaggtgaagttcgagggcgacaccctggtgaaccgcatcgagctgaagggcatcgacttcaaggaggacggcaacatcctggggcacaagctggagtacaactactttagcgacaacgtctatatcaccgccgacaagcagaagaacggcatcaaggccaacttcaagatccgccacaacatcgaggacggcggcgtgcagctcgccgaccactaccagcagaacacccccatcggcgacggccccgtgctgctgcccgacaaccactacctgagcacccagtccaagctgagcaaagaccccaacgagaagcgcgatcacatggtcctgctggagttcgtgaccgccgccgggatcactctcggcatggacgagctgtacaagtaaaatcaacctctggattacaaaatttgtgaaagattgactggtattcttaactatgttgctccttttacgctatgtggatacgctgctttaatgcctttgtatcatgttaactaaacttgtttattgcagcttataatggttacaaataaagcaatagcatcacaaatttcacaaataaagcatttttttcactgcattctagttgtggtttgtccaaactcatcaatgtatcttatcatgtctggaattgactcaaatgatgtcaattagtctatcagaagctcatctggtctcccttccgggggacaagacatccctgtttaatatttaaacagcagtgttcccaaactgggttcttatatcccttgctctggtcaaccaggttgcagggtttcctgtcctcacaggaacgaagtccctaaagaaacagtggcagccaggtttagccccggaattgactggattccttttttagggcccattggtatggctttttccccgtatccccccaggtgtctgcaggctcaaagagcagcgagaagcgttcagaggaaagcgatcccgtgccaccttccccgtgcccgggctgtccccgcacgctgccggctcggggatgcggggggagcgccggaccggagcggagccccgggcggctcgctgctgccccctagcgggggagggacgtaattacatccctgggggctttgggggggggctgtccctgatatctataacaagaaaatatatatataataagttatcacgtaagtagaacatgaaataacaatataattatcgtatgagttaaatcttaaaagtcacgtaaaagataatcatgcgtcattttgactcacgcggtcgttatagttcaaaatcagtgacacttaccgcattgacaagcacgcctcacgggagctccaagcggcgactgagatgtcctaaatgcacagcgacggattcgcgctatttagaaagagagagcaatatttcaagaatgcatgcgtcaattttacgcagactatctttctagggttaatctagctgcatcaggatcatatcgtcgggtcttttttccggctcagtcatcgcccaagctggcgctatctgggcatcggggaggaagaagcccgtgccttttcccgcgaggttgaagcggcatggaaagagtttgccgaggatgactgctgctgcattgacgttgagcgaaaacgcacgtttaccatgatgattcgggaaggtgtggccatgcacgcctttaacggtgaactgttcgttcaggccacctgggataccagttcgtcgcggcttttccggacacagttccggatggtcagcccgaagcgcatcagcaacccgaacaataccggcgacagccggaactgccgtgccggtgtgcagattaatgacagcggtgcggcgctgggatattacgtcagcgaggacgggtatcctggctggatgccgcagaaatggacatggataccccgtgagttacccggcgggcgcgcttggcgtaatcatggtcatagctgtttcctgtgtgaaattgttatccgctcacaattccacacaacatacgagccggaagcataaagtgtaaagcctggggtgcctaatgagtgagctaactcacattaattgcgttgcgctcactgcccgctttccagtcgggaaacctgtcgtgccagctgcattaatgaatcggccaacgcgcggggagaggcggtttgcgtattgggcgctcttccgcttcctcgctcactgactcgctgcgctcggtcgttcggctgcggcgagcggtatcagctcactcaaaggcggtaatacggttatccacagaatcaggggataacgcaggaaagaacatgtgagcaaaaggccagcaaaaggccaggaaccgtaaaaaggccgcgttgctggcgtttttccataggctccgcccccctgacgagcatcacaaaaatcgacgctcaagtcagaggtggcgaaacccgacaggactataaagataccaggcgtttccccctggaagctccctcgtgcgctctcctgttccgaccctgccgcttaccggatacctgtccgcctttctcccttcgggaagcgtggcgctttctcatagctcacgctgtaggtatctcagttcggtgtaggtcgttcgctccaagctgggctgtgtgcacgaaccccccgttcagcccgaccgctgcgccttatccggtaactatcgtcttgagtccaacccggtaagacacgacttatcgccactggcagcagccactggtaacaggattagcagagcgaggtatgtaggcggtgctacagagttcttgaagtggtggcctaactacggctacactagaaggacagtatttggtatctgcgctctgctgaagccagttaccttcggaaaaagagttggtagctcttgatccggcaaacaaaccaccgctggtagcggtggtttttttgtttgcaagcagcagattacgcgcagaaaaaaaggatctcaagaagatcctttgatcttttctacggggtctgacgctcagtggaacgaaaactcacgttaagggattttggtcatgagattatcaaaaaggatcttcacctagatccttttaaattaaaaatgaagttttaaatcaatctaaagtatatatgagtaaacttggtctgacagttaccaatgcttaatcagtgaggcacctatctcagcgatctgtctatttcgttcatccatagttgcctgactccccgtcgtgtagataactacgatacgggagggcttaccatctggccccagtgctgcaatgataccgcgagacccacgctcaccggctccagatttatcagcaataaaccagccagccggaagggccgagcgcagaagtggtcctgcaactttatccgcctccatccagtctattaattgttgccgggaagctagagtaagtagttcgccagttaatagtttgcgcaacgttgttgccattgctacaggcatcgtggtgtcacgctcgtcgtttggtatggcttcattcagctccggttcccaacgatcaaggcgagttacatgatcccccatgttgtgcaaaaaagcggttagctccttcggtcctccgatcgttgtcagaagtaagttggccgcagtgttatcactcatggttatggcagcactgcataattctcttactgtcatgccatccgtaagatgcttttctgtgactggtgagtactcaaccaagtcattctgagaatagtgtatgcggcgaccgagttgctcttgcccggcgtcaatacgggataataccgcgccacatagcagaactttaaaagtgctcatcattggaaaacgttcttcggggcgaaaactctcaaggatcttaccgctgttgagatccagttcgatgtaacccactcgtgcacccaactgatcttcagcatcttttactttcaccagcgtttctgggtgagcaaaaacaggaaggcaaaatgccgcaaaaaagggaataagggcgacacggaaatgttgaatactcat

SEQ ID NO: 79 - protein, 1090 aa, Artificial Sequence
  Description of Artificial Sequence: Synthetic polypeptide
MNIPALVENQKKYFGTYSVMAMLNAQTVLDHIQKVADIEGEQNENNENLWFHPVMSHLYNAKNGYDKQPEKTMFIIERLQSYFPFLKIMAENQREYSNGKYKQNRVEVNSNDIFEVLKRAFGVLKMYRDLTNAYKTYEEKLNDGCEFLTSTEQPLSGMINNYYTVALRNMNERYGYKTEDLAFIQDKRFKFVKDAYGKKKSQVNTGFFLSLQDYNGDTQKKLHLSGVGIALLICLFLDKQYINIFLSRLPIFSSYNAQSEERRIIIRSFGINSIKLPKDRIHSEKSNKSVAMDMLNEVKRCPDELFTTLSAEKQSRFRIISDDHNEVLMKRSSDRFVPLLLQYIDYGKLFDHIRFHVNMGKLRYLLKADKTCIDGQTRVRVIEQPLNGFGRLEEAETMRKQENGTFGNSGIRIRDFENMKRDDANPANYPYIVDTYTHYILENNKVEMFINDKEDSAPLLPVIEDDRYVVKTIPSCRMSTLEIPAMAFHMFLFGSKKTEKLIVDVHNRYKRLFQAMQKEEVTAENIASFGIAESDLPQKILDLISGNAHGKDVDAFIRLTVDDMLTDTERRIKRFKDDRKSIRSADNKMGKRGFKQISTGKLADFLAKDIVLFQPSVNDGENKITGLNYRIMQSAIAVYDSGDDYEAKQQFKLMFEKARLIGKGTTEPHPFLYKVFARSIPANAVEFYERYLIERKFYLTGLSNEIKKGNRVDVPFIRRDQNKWKTPAMKTLGRIYSEDLPVELPRQMFDNEIKSHLKSLPQMEGIDFNNANVTYLIAEYMKRVLDDDFQTFYQWNRNYRYMDMLKGEYDRKGSLQHCFTSVEEREGLWKERASRTERYRKQASNKIRSNRQMRNASSEEIETILDKRLSNSRNEYQKSEKVIRRYRVQDALLFLLAKKTLTELADFDGERFKLKEIMPDAEKGILSEIMPMSFTFEKGGKKYTITSEGMKLKNYGDFFVLASDKRIGNLLELVGSDIVSKEDIMEEFNKYDQCRPEISSIVFNLEKWAFDTYPELSARVDREEKVDFKSILKILLNNKNINKEQSDILRKIRNAFDANNYPDKGVVEIKALPEIAMSIKKAFGEYAIMK

SEQ ID NO: 80 - DNA, 10725 bp, Artificial Sequence
  Description of Artificial Sequence: Synthetic polynucleotide
actcttcctttttcaatattattgaagcatttatcagggttattgtctcatgagcggatacatatttgaatgtatttagaaaaataaacaaataggggttccgcgcacatttccccgaaaagtgccacctaaattgtaagcgttaatattttgttaaaattcgcgttaaatttttgttaaatcagctcattttttaaccaataggccgaaatcggcaaaatcccttataaatcaaaagaatagaccgagatagggttgagtgttgttccagtttggaacaagagtccactattaaagaacgtggactccaacgtcaaagggcgaaaaaccgtctatcagggcgatggcccactacgtgaaccatcaccctaatcaagttttttggggtcgaggtgccgtaaagcactaaatcggaaccctaaagggagcccccgatttagagcttgacggggaaagccggcgaacgtggcgagaaaggaagggaagaaagcgaaaggagcgggcgctagggcgctggcaagtgtagcggtcacgctgcgcgtaaccaccacacccgccgcgcttaatgcgccgctacagggcgcgtcccattcgccattcaggctgcgcaactgttgggaagggcgatcggtgcgggcctcttcgctattacgccagctggcgaaagggggatgtgctgcaaggcgattaagttgggtaacgccagggttttcccagtcacgacgttgtaaaacgacggccagtgagcgcgcctcgttcattcacgtttttgaacccgtggaggacgggcagactcgcggtgcaaatgtgttttacagcgtgatggagcagatgaagatgctcgacacgctgcagaacacgcagctagattaaccctagaaagataatcatattgtgacgtacgttaaagataatcatgtgtaaaattgacgcatgtgttttatcggtctgtatatcgaggtttatttattaatttgaatagatattaagttttattatatttacacttacatactaataataaattcaacaaacaatttatttatgtttatttatttattaaaaaaaacaaaaactcaaaatttcttctataaagtaacaaaacttttatgagggacagcccccccccaaagcccccagggatgtaattacgtccctcccccgctagggggcagcagcgagccgcccggggctccgctccggtccggcgctccccccgcatccccgagccggcagcgtgcggggacagcccgggcacggggaaggtggcacgggatcgctttcctctgaacgcttctcgctgctctttgagcctgcagacacctggggggatacggggaaaaggcctccacggccactagttctaccgggtaggggaggcgcttttcccaaggcagtctggagcatgcgctttagcagccccgctgggcacttggcgctacacaagtggcctctggcctcgcacacattccacatccaccggtaggcgccaaccggctccgttctttggtggccccttcgcgccaccttctactcctcccctagtcaggaagttcccccccgccccgcagctcgcgtcgtgcaggacgtgacaaatggaagtagcacgtctcattagtctcgtgcagatggacagcaccgctgagcaatggaagcgggtaggcctttggggcagcggccaatagcagctttgctccttcgctttctgggctcagaggctgggaaggggtgggtccgggggcgggctcaggggcgggctcaggggcggggcgggcgcccgaaggtcctccggaggcccggcattctgcacgcttcaaaagcgcacgtctgccgcgctgttctcctcttcctcatctccgggcctttcgacctgcaggttaattaaatgggtaagcctatccctaaccctctcctcggtctcgattctacggctagcatgaacatccccgctctggtggaaaaccagaagaagtactttggcacctacagcgtgatggccatgctgaacgctcagaccgtgctggaccacatccagaaggtggccgatattgagggcgagcagaacgagaacaacgagaatctgtggtttcaccccgtgatgagccacctgtacaacgccaagaacggctacgacaagcagcccgagaaaaccatgttcatcatcgagcggctgcagagctacttcccattcctgaagatcatggccgagaaccagagagagtacagcaacggcaagtacaagcagaaccgcgtggaagtgaacagcaacgacatcttcgaggtgctgaagcgcgccttcggcgtgctgaagatgtacagggacctgaccaacgcatacaagacctacgaggaaaagctgaacgacggctgcgagttcctgaccagcacagagcaacctctgagcggcatgatcaacaactactacacagtggccctgcggaacatgaacgagagatacggctacaagacagaggacctggccttcatccaggacaagcggttcaagttcgtgaaggacgcctacggcaagaaaaagtcccaagtgaataccggattcttcctgagcctgcaggactacaacggcgacacacagaagaagctgcacctgagcggagtgggaatcgccctgctgatctgcctgttcctggacaagcagtacatcaacatctttctgagcaggctgcccatcttctccagctacaatgcccagagcgaggaacggcggatcatcatcagatccttcggcatcaacagcatcaagctgcccaaggaccggatccacagcgagaagtccaacaagagcgtggccatggatatgctcaacgaagtgaagcggtgccccgacgagctgttcacaacactgtctgccgagaagcagtcccggttcagaatcatcagcgacgaccacaatgaagtgctgatgaagcggagcagcgacagattcgtgcctctgctgctgcagtatatcgattacggcaagctgttcgaccacatcaggttccacgtgaacatgggcaagctgagatacctgctgaaggccgacaagacctgcatcgacggccagaccagagtcagagtgatcgagcagcccctgaacggcttcggcagactggaagaggccgagacaatgcggaagcaagagaacggcaccttcggcaacagcggcatccggatcagagacttcgagaacatgaagcgggacgacgccaatcctgccaactatccctacatcgtggacacctacacacactacatcctggaaaacaacaaggtcgagatgtttatcaacgacaaagaggacagcgccccactgctgcccgtgatcgaggatgatagatacgtggtcaagacaatccccagctgccggatgagcaccctggaaattccagccatggccttccacatgtttctgttcggcagcaagaaaaccgagaagctgatcgtggacgtgcacaaccggtacaagagactgttccaggccatgcagaaagaagaagtgaccgccgagaatatcgccagcttcggaatcgccgagagcgacctgcctcagaagatcctggatctgatcagcggcaatgcccacggcaaggatgtggacgccttcatcagactgaccgtggacgacatgctgaccgacaccgagcggagaatcaagagattcaaggacgaccggaagtccattcggagcgccgacaacaagatgggaaagagaggcttcaagcagatctccacaggcaagctggccgacttcctggccaaggacatcgtgctgtttcagcccagcgtgaacgatggcgagaacaagatcaccggcctgaactaccggatcatgcagagcgccattgccgtgtacgatagcggcgacgattacgaggccaagcagcagttcaagctgatgttcgagaaggcccggctgatcggcaagggcacaacagagcctcatccatttctgtacaaggtgttcgcccgcagcatccccgccaatgccgtcgagttctacgagcgctacctgatcgagcggaagttctacctgaccggcctgtccaacgagatcaagaaaggcaacagagtggatgtgcccttcatccggcgggaccagaacaagtggaaaacacccgccatgaagaccctgggcagaatctacagcgaggatctgcccgtggaactgcccagacagatgttcgacaatgagatcaagtcccacctgaagtccctgccacagatggaaggcatcgacttcaacaatgccaacgtgacctatctgatcgccgagtacatgaagagagtgctggacgacgacttccagaccttctaccagtggaaccgcaactaccggtacatggacatgcttaagggcgagtacgacagaaagggctccctgcagcactgcttcaccagcgtggaagagagagaaggcctctggaaagagcgggcctccagaacagagcggtacagaaagcaggccagcaacaagatccgcagcaaccggcagatgagaaacgccagcagcgaagagatcgagacaatcctggataagcggctgagcaacagccggaacgagtaccagaaaagcgagaaagtgatccggcgctacagagtgcaggatgccctgctgtttctgctggccaaaaagaccctgaccgaactggccgatttcgacggcgagaggttcaaactgaaagaaatcatgcccgacgccgagaagggaatcctgagcgagatcatgcccatgagcttcaccttcgagaaaggcggcaagaagtacaccatcaccagcgagggcatgaagctgaagaactacggcgacttctttgtgctggctagcgacaagaggatcggcaacctgctggaactcgtgggcagcgacatcgtgtccaaagaggatatcatggaagagttcaacaaatacgaccagtgcaggcccgagatcagctccatcgtgttcaacctggaaaagtgggccttcgacacataccccgagctgtctgccagagtggaccgggaagagaaggtggacttcaagagcatcctgaaaatcctgctgaacaacaagaacatcaacaaagagcagagcgacatcctgcggaagatccggaacgccttcgatgcaaacaattaccccgacaaaggcgtggtggaaatcaaggccctgcctgagatcgccatgagcatcaagaaggcctttggggagtacgccatcatgaagctcgagggcggatccggtggttccggaggagctgtcgacatggcgactgtcgaaccggaaaccacccctactcctaatcccccgactacagaagaggagaaaacggaatctaatcaggaggttgctaacccagaacactatattaaacggcccctacagaacagatgggcactctggttttttaaaaatgataaaagcaaaacttggcaagcaaacctgcggctgatctccaagtttgatactgctgaagacttttttgctctgtacaaccatatccagttgtctagtaatttaatgcctggctgtgactactcactttttaaggatggtattgagcctatgtgggaagatgagaaaaacaaacggggaggacgatggctaattacattgaacaaacagcagagacgaagtgacctcgatcgcttttggctagagacacttctgtgccttattggagaatcttttgatgactacagtgatgatgtatgtggcgctgttgttaatgttagagctaaaggtgataagatagcaatatggactactgaatgtgaaaacagagaagctgttacacatatagggagggtatacaaggaaaggttaggacttcctccaaagatagtgattggttatcagtcccacgcagacacagctactaagagcggcgacaccactaaaaataggtttgttgtttctagacttaagtaagcctcgactgtgccttctagttgccagccatctgttgtttgcccctcccccgtgccttccttgaccctggaaggtgccactcccactgtcctttcctaataaaatgaggaaattgcatcgcattgtctgagtaggtgtcattctattctggggggtggggtggggcaggacagcaagggggaggattgggaagacaatagcaggcatgctggggagtgcccgtcagtgggcagagcgcacatcgcccacagtccccgagaagttggggggaggggtcggcaattgaacgggtgcctagagaaggtggcgcggggtaaactgggaaagtgatgtcgtgtactggctccgcctttttcccgagggtgggggagaaccgtatataagtgcagtagtcgccgtgaacgttctttttcgcaacgggtttgccgccagaacacagatggtctctaaaggaggttcgtccgacgacgaagcaacagcggactcgcagcacgccgcacctcctaagaagaaaaggaaggtaggggatccccgggtaccggtcgccaccatggtgagcaagggcgaggagctgttcaccggggtggtgcccatcctggtcgagctggacggcgacgtaaacggccacaagttcagcgtgtccggcgagggcgagggcgatgccacctacggcaagctgaccctgaagttcatctgcaccaccggcaagctgcccgtgccctggcccaccctcgtgaccaccctgtcctggggcgtgcagtgcttcgcccgctaccccgaccacatgaagcagcacgacttcttcaagtccgccatgcccgaaggctacgtccaggagcgcaccatcttcttcaaggacgacggcaactacaagacccgcgccgaggtgaagttcgagggcgacaccctggtgaaccgcatcgagctgaagggcatcgacttcaaggaggacggcaacatcctggggcacaagctggagtacaactactttagcgacaacgtctatatcaccgccgacaagcagaagaacggcatcaaggccaacttcaagatccgccacaacatcgaggacggcggcgtgcagctcgccgaccactaccagcagaacacccccatcggcgacggccccgtgctgctgcccgacaaccactacctgagcacccagtccaagctgagcaaagaccccaacgagaagcgcgatcacatggtcctgctggagttcgtgaccgccgccgggatcactctcggcatggacgagctgtacaagtaaaatcaacctctggattacaaaatttgtgaaagattgactggtattcttaactatgttgctccttttacgctatgtggatacgctgctttaatgcctttgtatcatgttaactaaacttgtttattgcagcttataatggttacaaataaagcaatagcatcacaaatttcacaaataaagcatttttttcactgcattctagttgtggtttgtccaaactcatcaatgtatcttatcatgtctggaattgactcaaatgatgtcaattagtctatcagaagctcatctggtctcccttccgggggacaagacatccctgtttaatatttaaacagcagtgttcccaaactgggttcttatatcccttgctctggtcaaccaggttgcagggtttcctgtcctcacaggaacgaagtccctaaagaaacagtggcagccaggtttagccccggaattgactggattccttttttagggcccattggtatggctttttccccgtatccccccaggtgtctgcaggctcaaagagcagcgagaagcgttcagaggaaagcgatcccgtgccaccttccccgtgcccgggctgtccccgcacgctgccggctcggggatgcggggggagcgccggaccggagcggagccccgggcggctcgctgctgccccctagcgggggagggacgtaattacatccctgggggctttgggggggggctgtccctgatatctataacaagaaaatatatatataataagttatcacgtaagtagaacatgaaataacaatataattatcgtatgagttaaatcttaaaagtcacgtaaaagataatcatgcgtcattttgactcacgcggtcgttatagttcaaaatcagtgacacttaccgcattgacaagcacgcctcacgggagctccaagcggcgactgagatgtcctaaatgcacagcgacggattcgcgctatttagaaagagagagcaatatttcaagaatgcatgcgtcaattttacgcagactatctttctagggttaatctagctgcatcaggatcatatcgtcgggtcttttttccggctcagtcatcgcccaagctggcgctatctgggcatcggggaggaagaagcccgtgccttttcccgcgaggttgaagcggcatggaaagagtttgccgaggatgactgctgctgcattgacgttgagcgaaaacgcacgtttaccatgatgattcgggaaggtgtggccatgcacgcctttaacggtgaactgttcgttcaggccacctgggataccagttcgtcgcggcttttccggacacagttccggatggtcagcccgaagcgcatcagcaacccgaacaataccggcgacagccggaactgccgtgccggtgtgcagattaatgacagcggtgcggcgctgggatattacgtcagcgaggacgggtatcctggctggatgccgcagaaatggacatggataccccgtgagttacccggcgggcgcgcttggcgtaatcatggtcatagctgtttcctgtgtgaaattgttatccgctcacaattccacacaacatacgagccggaagcataaagtgtaaagcctggggtgcctaatgagtgagctaactcacattaattgcgttgcgctcactgcccgctttccagtcgggaaacctgtcgtgccagctgcattaatgaatcggccaacgcgcggggagaggcggtttgcgtattgggcgctcttccgcttcctcgctcactgactcgctgcgctcggtcgttcggctgcggcgagcggtatcagctcactcaaaggcggtaatacggttatccacagaatcaggggataacgcaggaaagaacatgtgagcaaaaggccagcaaaaggccaggaaccgtaaaaaggccgcgttgctggcgtttttccataggctccgcccccctgacgagcatcacaaaaatcgacgctcaagtcagaggtggcgaaacccgacaggactataaagataccaggcgtttccccctggaagctccctcgtgcgctctcctgttccgaccctgccgcttaccggatacctgtccgcctttctcccttcgggaagcgtggcgctttctcatagctcacgctgtaggtatctcagttcggtgtaggtcgttcgctccaagctgggctgtgtgcacgaaccccccgttcagcccgaccgctgcgccttatccggtaactatcgtcttgagtccaacccggtaagacacgacttatcgccactggcagcagccactggtaacaggattagcagagcgaggtatgtaggcggtgctacagagttcttgaagtggtggcctaactacggctacactagaaggacagtatttggtatctgcgctctgctgaagccagttaccttcggaaaaagagttggtagctcttgatccggcaaacaaaccaccgctggtagcggtggtttttttgtttgcaagcagcagattacgcgcagaaaaaaaggatctcaagaagatcctttgatcttttctacggggtctgacgctcagtggaacgaaaactcacgttaagggattttggtcatgagattatcaaaaaggatcttcacctagatccttttaaattaaaaatgaagttttaaatcaatctaaagtatatatgagtaaacttggtctgacagttaccaatgcttaatcagtgaggcacctatctcagcgatctgtctatttcgttcatccatagttgcctgactccccgtcgtgtagataactacgatacgggagggcttaccatctggccccagtgctgcaatgataccgcgagacccacgctcaccggctccagatttatcagcaataaaccagccagccggaagggccgagcgcagaagtggtcctgcaactttatccgcctccatccagtctattaattgttgccgggaagctagagtaagtagttcgccagttaatagtttgcgcaacgttgttgccattgctacaggcatcgtggtgtcacgctcgtcgtttggtatggcttcattcagctccggttcccaacgatcaaggcgagttacatgatcccccatgttgtgcaaaaaagcggttagctccttcggtcctccgatcgttgtcagaagtaagttggccgcagtgttatcactcatggttatggcagcactgcataattctcttactgtcatgccatccgtaagatgcttttctgtgactggtgagtactcaaccaagtcattctgagaatagtgtatgcggcgaccgagttgctcttgcccggcgtcaatacgggataataccgcgccacatagcagaactttaaaagtgctcatcattggaaaacgttcttcggggcgaaaactctcaaggatcttaccgctgttgagatccagttcgatgtaacccactcgtgcacccaactgatcttcagcatcttttactttcaccagcgtttctgggtgagcaaaaacaggaaggcaaaatgccgcaaaaaagggaataagggcgacacggaaatgttgaatactcat

SEQ ID NO: 81 - DNA, 10428 bp, Artificial Sequence
  Description of Artificial Sequence: Synthetic polynucleotide
actcttcctttttcaatattattgaagcatttatcagggttattgtctcatgagcggatacatatttgaatgtatttagaaaaataaacaaataggggttccgcgcacatttccccgaaaagtgccacctaaattgtaagcgttaatattttgttaaaattcgcgttaaatttttgttaaatcagctcattttttaaccaataggccgaaatcggcaaaatcccttataaatcaaaagaatagaccgagatagggttgagtgttgttccagtttggaacaagagtccactattaaagaacgtggactccaacgtcaaagggcgaaaaaccgtctatcagggcgatggcccactacgtgaaccatcaccctaatcaagttttttggggtcgaggtgccgtaaagcactaaatcggaaccctaaagggagcccccgatttagagcttgacggggaaagccggcgaacgtggcgagaaaggaagggaagaaagcgaaaggagcgggcgctagggcgctggcaagtgtagcggtcacgctgcgcgtaaccaccacacccgccgcgcttaatgcgccgctacagggcgcgtcccattcgccattcaggctgcgcaactgttgggaagggcgatcggtgcgggcctcttcgctattacgccagctggcgaaagggggatgtgctgcaaggcgattaagttgggtaacgccagggttttcccagtcacgacgttgtaaaacgacggccagtgagcgcgcctcgttcattcacgtttttgaacccgtggaggacgggcagactcgcggtgcaaatgtgttttacagcgtgatggagcagatgaagatgctcgacacgctgcagaacacgcagctagattaaccctagaaagataatcatattgtgacgtacgttaaagataatcatgtgtaaaattgacgcatgtgttttatcggtctgtatatcgaggtttatttattaatttgaatagatattaagttttattatatttacacttacatactaataataaattcaacaaacaatttatttatgtttatttatttattaaaaaaaacaaaaactcaaaatttcttctataaagtaacaaaacttttatgagggacagcccccccccaaagcccccagggatgtaattacgtccctcccccgctagggggcagcagcgagccgcccggggctccgctccggtccggcgctccccccgcatccccgagccggcagcgtgcggggacagcccgggcacggggaaggtggcacgggatcgctttcctctgaacgcttctcgctgctctttgagcctgcagacacctggggggatacggggaaaaggcctccacggccactagttctaccgggtaggggaggcgcttttcccaaggcagtctggagcatgcgctttagcagccccgctgggcacttggcgctacacaagtggcctctggcctcgcacacattccacatccaccggtaggcgccaaccggctccgttctttggtggccccttcgcgccaccttctactcctcccctagtcaggaagttcccccccgccccgcagctcgcgtcgtgcaggacgtgacaaatggaagtagcacgtctcattagtctcgtgcagatggacagcaccgctgagcaatggaagcgggtaggcctttggggcagcggccaatagcagctttgctccttcgctttctgggctcagaggctgggaaggggtgggtccgggggcgggctcaggggcgggctcaggggcggggcgggcgcccgaaggtcctccggaggcccggcattctgcacgcttcaaaagcgcacgtctgccgcgctgttctcctcttcctcatctccgggcctttcgacctgcaggttaattaaatgggtaagcctatccctaaccctctcctcggtctcgattctacggctagcatgaacatccccgctctggtggaaaaccagaagaagtactttggcacctacagcgtgatggccatgctgaacgctcagaccgtgctggaccacatccagaaggtggccgatattgagggcgagcagaacgagaacaacgagaatctgtggtttcaccccgtgatgagccacctgtacaacgccaagaacggctacgacaagcagcccgagaaaaccatgttcatcatcgagcggctgcagagctacttcccattcctgaagatcatggccgagaaccagagagagtacagcaacggcaagtacaagcagaaccgcgtggaagtgaacagcaacgacatcttcgaggtgctgaagcgcgccttcggcgtgctgaagatgtacagggacctgaccaacgcatacaagacctacgaggaaaagctgaacgacggctgcgagttcctgaccagcacagagcaacctctgagcggcatgatcaacaactactacacagtggccctgcggaacatgaacgagagatacggctacaagacagaggacctggccttcatccaggacaagcggttcaagttcgtgaaggacgcctacggcaagaaaaagtcccaagtgaataccggattcttcctgagcctgcaggactacaacggcgacacacagaagaagctgcacctgagcggagtgggaatcgccctgctgatctgcctgttcctggacaagcagtacatcaacatctttctgagcaggctgcccatcttctccagctacaatgcccagagcgaggaacggcggatcatcatcagatccttcggcatcaacagcatcaagctgcccaaggaccggatccacagcgagaagtccaacaagagcgtggccatggatatgctcaacgaagtgaagcggtgccccgacgagctgttcacaacactgtctgccgagaagcagtcccggttcagaatcatcagcgacgaccacaatgaagtgctgatgaagcggagcagcgacagattcgtgcctctgctgctgcagtatatcgattacggcaagctgttcgaccacatcaggttccacgtgaacatgggcaagctgagatacctgctgaaggccgacaagacctgcatcgacggccagaccagagtcagagtgatcgagcagcccctgaacggcttcggcagactggaagaggccgagacaatgcggaagcaagagaacggcaccttcggcaacagcggcatccggatcagagacttcgagaacatgaagcgggacgacgccaatcctgccaactatccctacatcgtggacacctacacacactacatcctggaaaacaacaaggtcgagatgtttatcaacgacaaagaggacagcgccccactgctgcccgtgatcgaggatgatagatacgtggtcaagacaatccccagctgccggatgagcaccctggaaattccagccatggccttccacatgtttctgttcggcagcaagaaaaccgagaagctgatcgtggacgtgcacaaccggtacaagagactgttccaggccatgcagaaagaagaagtgaccgccgagaatatcgccagcttcggaatcgccgagagcgacctgcctcagaagatcctggatctgatcagcggcaatgcccacggcaaggatgtggacgccttcatcagactgaccgtggacgacatgctgaccgacaccgagcggagaatcaagagattcaaggacgaccggaagtccattcggagcgccgacaacaagatgggaaagagaggcttcaagcagatctccacaggcaagctggccgacttcctggccaaggacatcgtgctgtttcagcccagcgtgaacgatggcgagaacaagatcaccggcctgaactaccggatcatgcagagcgccattgccgtgtacgatagcggcgacgattacgaggccaagcagcagttcaagctgatgttcgagaaggcccggctgatcggcaagggcacaacagagcctcatccatttctgtacaaggtgttcgcccgcagcatccccgccaatgccgtcgagttctacgagcgctacctgatcgagcggaagttctacctgaccggcctgtccaacgagatcaagaaaggcaacagagtggatgtgcccttcatccggcgggaccagaacaagtggaaaacacccgccatgaagaccctgggcagaatctacagcgaggatctgcccgtggaactgcccagacagatgttcgacaatgagatcaagtcccacctgaagtccctgccacagatggaaggcatcgacttcaacaatgccaacgtgacctatctgatcgccgagtacatgaagagagtgctggacgacgacttccagaccttctaccagtggaaccgcaactaccggtacatggacatgcttaagggcgagtacgacagaaagggctccctgcagcactgcttcaccagcgtggaagagagagaaggcctctggaaagagcgggcctccagaacagagcggtacagaaagcaggccagcaacaagatccgcagcaaccggcagatgagaaacgccagcagcgaagagatcgagacaatcctggataagcggctgagcaacagccggaacgagtaccagaaaagcgagaaagtgatccggcgctacagagtgcaggatgccctgctgtttctgctggccaaaaagaccctgaccgaactggccgatttcgacggcgagaggttcaaactgaaagaaatcatgcccgacgccgagaagggaatcctgagcgagatcatgcccatgagcttcaccttcgagaaaggcggcaagaagtacaccatcaccagcgagggcatgaagctgaagaactacggcgacttctttgtgctggctagcgacaagaggatcggcaacctgctggaactcgtgggcagcgacatcgtgtccaaagaggatatcatggaagagttcaacaaatacgaccagtgcaggcccgagatcagctccatcgtgttcaacctggaaaagtgggccttcgacacataccccgagctgtctgccagagtggaccgggaagagaaggtggacttcaagagcatcctgaaaatcctgctgaacaacaagaacatcaacaaagagcagagcgacatcctgcggaagatccggaacgccttcgatgcaaacaattaccccgacaaaggcgtggtggaaatcaaggccctgcctgagatcgccatgagcatcaagaaggcctttggggagtacgccatcatgaagctcgagggcggatccggtggttccggaggagctgtcgacatgtccgggggcagcagctgcagccagaccccaagcgctgccgcagccgccactcgccgggtggtgctcggcgccggcgtgcagctcccgcccggggactacagcacggcccccggcggcacgctcttcagcaccgccccgggaggtaccaggatcatctatgaccggaaattcctgatggagtgtcggaacgcacctgtgaccaaagcacccccaagggatctgcccaccattccgggggtcaccagcccttccagtgatgagccccccatggaagccagccagagccacctgcgcaatagcccagaagataagcgggcgggcggtgaagagtcacaggctgagatggacatttctagacttaagtaagcctcgactgtgccttctagttgccagccatctgttgtttgcccctcccccgtgccttccttgaccctggaaggtgccactcccactgtcctttcctaataaaatgaggaaattgcatcgcattgtctgagtaggtgtcattctattctggggggtggggtggggcaggacagcaagggggaggattgggaagacaatagcaggcatgctggggagtgcccgtcagtgggcagagcgcacatcgcccacagtccccgagaagttggggggaggggtcggcaattgaacgggtgcctagagaaggtggcgcggggtaaactgggaaagtgatgtcgtgtactggctccgcctttttcccgagggtgggggagaaccgtatataagtgcagtagtcgccgtgaacgttctttttcgcaacgggtttgccgccagaacacagatggtctctaaaggaggttcgtccgacgacgaagcaacagcggactcgcagcacgccgcacctcctaagaagaaaaggaaggtaggggatccccgggtaccggtcgccaccatggtgagcaagggcgaggagctgttcaccggggtggtgcccatcctggtcgagctggacggcgacgtaaacggccacaagttcagcgtgtccggcgagggcgagggcgatgccacctacggcaagctgaccctgaagttcatctgcaccaccggcaagctgcccgtgccctggcccaccctcgtgaccaccctgtcctggggcgtgcagtgcttcgcccgctaccccgaccacatgaagcagcacgacttcttcaagtccgccatgcccgaaggctacgtccaggagcgcaccatcttcttcaaggacgacggcaactacaagacccgcgccgaggtgaagttcgagggcgacaccctggtgaaccgcatcgagctgaagggcatcgacttcaaggaggacggcaacatcctggggcacaagctggagtacaactactttagcgacaacgtctatatcaccgccgacaagcagaagaacggcatcaaggccaacttcaagatccgccacaacatcgaggacggcggcgtgcagctcgccgaccactaccagcagaacacccccatcggcgacggccccgtgctgctgcccgacaaccactacctgagcacccagtccaagctgagcaaagaccccaacgagaagcgcgatcacatggtcctgctggagttcgtgaccgccgccgggatcactctcggcatggacgagctgtacaagtaaaatcaacctctggattacaaaatttgtgaaagattgactggtattcttaactatgttgctccttttacgctatgtggatacgctgctttaatgcctttgtatcatgttaactaaacttgtttattgcagcttataatggttacaaataaagcaatagcatcacaaatttcacaaataaagcatttttttcactgcattctagttgtggtttgtccaaactcatcaatgtatcttatcatgtctggaattgactcaaatgatgtcaattagtctatcagaagctcatctggtctcccttccgggggacaagacatccctgtttaatatttaaacagcagtgttcccaaactgggttcttatatcccttgctctggtcaaccaggttgcagggtttcctgtcctcacaggaacgaagtccctaaagaaacagtggcagccaggtttagccccggaattgactggattccttttttagggcccattggtatggctttttccccgtatccccccaggtgtctgcaggctcaaagagcagcgagaagcgttcagaggaaagcgatcccgtgccaccttccccgtgcccgggctgtccccgcacgctgccggctcggggatgcggggggagcgccggaccggagcggagccccgggcggctcgctgctgccccctagcgggggagggacgtaattacatccctgggggctttgggggggggctgtccctgatatctataacaagaaaatatatatataataagttatcacgtaagtagaacatgaaataacaatataattatcgtatgagttaaatcttaaaagtcacgtaaaagataatcatgcgtcattttgactcacgcggtcgttatagttcaaaatcagtgacacttaccgcattgacaagcacgcctcacgggagctccaagcggcgactgagatgtcctaaatgcacagcgacggattcgcgctatttagaaagagagagcaatatttcaagaatgcatgcgtcaattttacgcagactatctttctagggttaatctagctgcatcaggatcatatcgtcgggtcttttttccggctcagtcatcgcccaagctggcgctatctgggcatcggggaggaagaagcccgtgccttttcccgcgaggttgaagcggcatggaaagagtttgccgaggatgactgctgctgcattgacgttgagcgaaaacgcacgtttaccatgatgattcgggaaggtgtggccatgcacgcctttaacggtgaactgttcgttcaggccacctgggataccagttcgtcgcggcttttccggacacagttccggatggtcagcccgaagcgcatcagcaacccgaacaataccggcgacagccggaactgccgtgccggtgtgcagattaatgacagcggtgcggcgctgggatattacgtcagcgaggacgggtatcctggctggatgccgcagaaatggacatggataccccgtgagttacccggcgggcgcgcttggcgtaatcatggtcatagctgtttcctgtgtgaaattgttatccgctcacaattccacacaacatacgagccggaagcataaagtgtaaagcctggggtgcctaatgagtgagctaactcacattaattgcgttgcgctcactgcccgctttccagtcgggaaacctgtcgtgccagctgcattaatgaatcggccaacgcgcggggagaggcggtttgcgtattgggcgctcttccgcttcctcgctcactgactcgctgcgctcggtcgttcggctgcggcgagcggtatcagctcactcaaaggcggtaatacggttatccacagaatcaggggataacgcaggaaagaacatgtgagcaaaaggccagcaaaaggccaggaaccgtaaaaaggccgcgttgctggcgtttttccataggctccgcccccctgacgagcatcacaaaaatcgacgctcaagtcagaggtggcgaaacccgacaggactataaagataccaggcgtttccccctggaagctccctcgtgcgctctcctgttccgaccctgccgcttaccggatacctgtccgcctttctcccttcgggaagcgtggcgctttctcatagctcacgctgtaggtatctcagttcggtgtaggtcgttcgctccaagctgggctgtgtgcacgaaccccccgttcagcccgaccgctgcgccttatccggtaactatcgtcttgagtccaacccggtaagacacgacttatcgccactggcagcagccactggtaacaggattagcagagcgaggtatgtaggcggtgctacagagttcttgaagtggtggcctaactacggctacactagaaggacagtatttggtatctgcgctctgctgaagccagttaccttcggaaaaagagttggtagctcttgatccggcaaacaaaccaccgctggtagcggtggtttttttgtttgcaagcagcagattacgcgcagaaaaaaaggatctcaagaagatcctttgatcttttctacggggtctgacgctcagtggaacgaaaactcacgttaagggattttggtcatgagattatcaaaaaggatcttcacctagatccttttaaattaaaaatgaagttttaaatcaatctaaagtatatatgagtaaacttggtctgacagttaccaatgcttaatcagtgaggcacctatctcagcgatctgtctatttcgttcatccatagttgcctgactccccgtcgtgtagataactacgatacgggagggcttaccatctggccccagtgctgcaatgataccgcgagacccacgctcaccggctccagatttatcagcaataaaccagccagccggaagggccgagcgcagaagtggtcctgcaactttatccgcctccatccagtctattaattgttgccgggaagctagagtaagtagttcgccagttaatagtttgcgcaacgttgttgccattgctacaggcatcgtggtgtcacgctcgtcgtttggtatggcttcattcagctccggttcccaacgatcaaggcgagttacatgatcccccatgttgtgcaaaaaagcggttagctccttcggtcctccgatcgttgtcagaagtaagttggccgcagtgttatcactcatggttatggcagcactgcataattctcttactgtcatgccatccgtaagatgcttttctgtgactggtgagtactcaaccaagtcattctgagaatagtgtatgcggcgaccgagttgctcttgcccggcgtcaatacgggataataccgcgccacatagcagaactttaaaagtgctcatcattggaaaacgttcttcggggcgaaaactctcaaggatcttaccgctgttgagatccagttcgatgtaacccactcgtgcacccaactgatcttcagcatcttttactttcaccagcgtttctgggtgagcaaaaacaggaaggcaaaatgccgcaaaaaagggaataagggcgacacggaaatgttgaatactcat

SEQ ID NO: 82 - DNA, 10574 bp, Artificial Sequence
  Description of Artificial Sequence: Synthetic polynucleotide
actcttcctttttcaatattattgaagcatttatcagggttattgtctcatgagcggatacatatttgaatgtatttagaaaaataaacaaataggggttccgcgcacatttccccgaaaagtgccacctaaattgtaagcgttaatattttgttaaaattcgcgttaaatttttgttaaatcagctcattttttaaccaataggccgaaatcggcaaaatcccttataaatcaaaagaatagaccgagatagggttgagtgttgttccagtttggaacaagagtccactattaaagaacgtggactccaacgtcaaagggcgaaaaaccgtctatcagggcgatggcccactacgtgaaccatcaccctaatcaagttttttggggtcgaggtgccgtaaagcactaaatcggaaccctaaagggagcccccgatttagagcttgacggggaaagccggcgaacgtggcgagaaaggaagggaagaaagcgaaaggagcgggcgctagggcgctggcaagtgtagcggtcacgctgcgcgtaaccaccacacccgccgcgcttaatgcgccgctacagggcgcgtcccattcgccattcaggctgcgcaactgttgggaagggcgatcggtgcgggcctcttcgctattacgccagctggcgaaagggggatgtgctgcaaggcgattaagttgggtaacgccagggttttcccagtcacgacgttgtaaaacgacggccagtgagcgcgcctcgttcattcacgtttttgaacccgtggaggacgggcagactcgcggtgcaaatgtgttttacagcgtgatggagcagatgaagatgctcgacacgctgcagaacacgcagctagattaaccctagaaagataatcatattgtgacgtacgttaaagataatcatgtgtaaaattgacgcatgtgttttatcggtctgtatatcgaggtttatttattaatttgaatagatattaagttttattatatttacacttacatactaataataaattcaacaaacaatttatttatgtttatttatttattaaaaaaaacaaaaactcaaaatttcttctataaagtaacaaaacttttatgagggacagcccccccccaaagcccccagggatgtaattacgtccctcccccgctagggggcagcagcgagccgcccggggctccgctccggtccggcgctccccccgcatccccgagccggcagcgtgcggggacagcccgggcacggggaaggtggcacgggatcgctttcctctgaacgcttctcgctgctctttgagcctgcagacacctggggggatacggggaaaaggcctccacggccaaaaaaagcaccgactcggtgccactttttcaagttgataacggactagccttatttaaacttgctatgctgtttccagcatagctcttaaacattcttacgctgagtacttcggtgtttcgtcctttccacaagatatataaagccaagaaatcgaaatactttcaagttacggtaagcatatgatagtccattttaaaacataattttaaaactgcaaactacccaagaaattattactttctacgtcacgtattttgtactaatatctttgtgtttacagtcaaattaattctaattatctctctaacagccttgtatcgtatatgcaaatatgaaggaatcatgggaaataggccctcttcctgcccgacctgactagtactttcacttttctctatcactgatagggagtggtaaactcgactttcacttttctctatcactgatagggagtggtaaactcgactttcacttttctctatcactgatagggagtggtaaactcgactttcacttttctctatcactgatagggagtggtaaactcgactttcacttttctctatcactgatagggagtggtaaactcgactttcacttttctctatcactgatagggagtggtaaactcgactttcacttttctctatcactgatagggagtggtaaactcgacctatataagcagagctcgtttagtgaaccgtcagatcgcctggagacgccatccacgctgttttgacctccatagaagacaccgggaccgatccagcctccgcggccccgaattcatgccagagccagcgaagtctgctcccgccccgaaaaagggctccaagaaggcggtgactaaggcgcagaagaaaggcggcaagaagcgcaagcgcagccgcaaggagagctattccatctatgtgtacaaggttctgaagcaggtccaccctgacaccggcatttcgtccaaggccatgggcatcatgaattcgtttgtgaacgacattttcgagcgcatcgcaggtgaggcttcccgcctggcgcattacaacaagcgctcgaccatcacctccagggagatccagacggccgtgcgcctgctgctgcctggggagttggccaagcacgccgtgtccgagggtactaaggccatcaccaagtacaccagcgctaaggatccccgggtaccggtcgccaccatggtgagcaagggcgaggagctgttcaccggggtggtgcccatcctggtcgagctggacggcgacgtaaacggccacaagttcagcgtgtccggcgagggcgagggcgatgccacctacggcaagctgaccctgaagttcatctgcaccaccggcaagctgcccgtgccctggcccaccctcgtgaccaccttcggctacggcctgatgtgcttcgcccgctaccccgaccacatgaagcagcacgacttcttcaagtccgccatgcccgaaggctacgtccaggagcgcaccatcttcttcaaggacgacggcaactacaagacccgcgccgaggtgaagttcgagggcgacaccctggtgaaccgcatcgagctgaagggcatcgacttcaaggaggacggcaacatcctggggcacaagctggagtacaactacaacagccacaacgtctatatcatggccgacaagcagaagaacggcatcaaggtgaacttcaagatccgccacaacatcgaggacggcagcgtgcagctcgccgaccactaccagcagaacacccccatcggcgacggccccgtgctgctgcccgacaaccactacctgagctaccagtccgccctgagcaaagaccccaacgagaagcgcgatcacatggtcctgctggagttcgtgaccgccgccgggatcactctcggcatggacgagctgtacaagtaatctagagctagcgcatatgtccacttaagggcgctgacatgcgcatgtgaggatcaattcttacgctgagtacttcgattcctcaaatagcaagacagcccacatggcattccacttatcactggcatcctagatctgatagctttgttctcaaagtctcgagaaattcgaatttaaatcggcctcgactgtgccttctagttgccagccatctgttgtttgcccctcccccgtgccttccttgaccctggaaggtgccactcccactgtcctttcctaataaaatgaggaaattgcatcgcattgtctgagtaggtgtcattctattctggggggtggggtggggcaggacagcaagggggaggattgggaagacaatagcaggcatgctggggacgcggccgcgaaggatctgcgatcgctccggtgcccgtcagtgggcagagcgcacatcgcccacagtccccgagaagttggggggaggggtcggcaattgaacgggtgcctagagaaggtggcgcggggtaaactgggaaagtgatgtcgtgtactggctccgcctttttcccgagggtgggggagaaccgtatataagtgcagtagtcgccgtgaacgttctttttcgcaacgggtttgccgccagaacacagctgaagcttcgaggggctcgcatctctccttcacgcgcccgccgccctacctgaggccgccatccacgccggttgagtcgcgttctgccgcctcccgcctgtggtgcctcctgaactgcgtccgccgtctaggtaagtttaaagctcaggtcgagaccgggcctttgtccggcgctcccttggagcctacctagactcagccggctctccacgctttgcctgaccctgcttgctcaactctacgtctttgtttcgttttctgttctgcgccgttacagatccaagctgtgaccggcgcctacgctagatgaccgagtacaagcccacggtgcgcctcgccacccgcgacgacgtccccagggccgtacgcaccctcgccgccgcgttcgccgactaccccgccacgcgccacaccgtcgatccggaccgccacatcgagcgggtcaccgagctgcaagaactcttcctcacgcgcgtcgggctcgacatcggcaaggtgtgggtcgcggacgacggcgccgcggtggcggtctggaccacgccggagagcgtcgaagcgggggcggtgttcgccgagatcggcccgcgcatggccgagttgagcggttcccggctggccgcgcagcaacagatggaaggcctcctggcgccgcaccggcccaaggagcccgcgtggttcctggccaccgtcggcgtctcgcccgaccaccagggcaagggtctgggcagcgccgtcgtgctccccggagtggaggcggccgagcgcgccggggtgcccgccttcctggagacctccgcgccccgcaacctccccttctacgagcggctcggcttcaccgtcaccgccgacgtcgaggtgcccgaaggaccgcgcacctggtgcatgacccgcaagcccggtgccggaagcggagctactaacttcagcctgctgaagcaggctggagacgtggaggagaaccctggacctatgtctagactggacaagagcaaagtcataaacggcgctctggaattactcaatggagtcggtatcgaaggcctgacgacaaggaaactcgctcaaaagctgggagttgagcagcctaccctgtactggcacgtgaagaacaagcgggccctgctcgatgccctgccaatcgagatgctggacaggcatcatacccacttctgccccctggaaggcgagtcatggcaagactttctgcggaacaacgccaagtcattccgctgtgctctcctctcacatcgcgacggggctaaagtgcatctcggcacccgcccaacagagaaacagtacgaaaccctggaaaatcagctcgcgttcctgtgtcagcaaggcttctccctggagaacgcactgtacgctctgtccgccgtgggccactttacactgggctgcgtattggaggaacaggagcatcaagtagcaaaagaggaaagagagacacctaccaccgattctatgcccccacttctgagacaagcaattgagctgttcgaccggcagggagccgaacctgccttccttttcggcctggaactaatcatatgtggcctggagaaacagctaaagtgcgaaagcggcgggccggccgacgcccttgacgattttgacttagacatgctcccagccgatgcccttgacgactttgaccttgatatgctgcctgctgacgctcttgacgattttgaccttgacatgctccccgggtaactaagtaaccctctccctcccccccccctaacgttactggccgaagccgcttggaataaggccggtgtgcgtttgtctatatgttattttccaccatattgccgtcttttggcaatgtgagggcccggaaacctggccctgtcttcttgacgagcattcctaggggtctttcccctctcgccaaaggaatgcaaggtctgttgaatgtcgtgaaggaagcagttcctctggaagcttcttgaagacaaacaacgtctgtagcgaccctttgcaggcagcggaaccccccacctggcgacaggtgcctctgcggccaaaagccacgtgtataagatacacctgcaaaggcggcacaaccccagtgccacgttgtgagttggatagttgtggaaagagtcaaatggctctcctcaagcgtattcaacaaggggctgaaggatgcccagaaggtaccccattgtatgggatctgatctggggcctcggtgcacatgctttacatgtgtttagtcgaggttaaaaaaacgtctaggccccccgaaccacggggacgtggttttcctttgaaaaacacgatgataatatggccacaaccatggtctctaaaggaggttcgtccgacgacgaagcaacagcggactcgcagcacgccgcacctcctaagaagaaaaggaaggtaggggatccccgggtaccggtcgccaccatggccatcatcaaggagttcatgcgcttcaaggtgcacatggagggctccgtgaacggccacgagttcgagatcgagggcgagggcgagggccgcccctacgagggcacccagaccgccaagctgaaggtgaccaagggtggccccctgcccttcgcctgggacatcctgtcccctcagttcatgtacggctccaaggcctacgtgaagcaccccgccgacatccccgactacttgaagctgtccttccccgagggcttcaagtgggagcgcgtgatgaacttcgaggacggcggcgtggtgaccgtgacccaggactcctccctgcaggacggcgagttcatctacaaggtgaagctgcgcggcaccaacttcccctccgacggccccgtaatgcagaagaagaccatgggctgggaggcctcctccgagcggatgtaccccgaggacggcgccctgaagggcgagatcaagcagaggctgaagctgaaggacggcggccactacgacgctgaggtcaagaccacctacaaggccaagaagcccgtgcagctgcccggcgcctacaacgtcaacatcaagttggacatcacctcccacaacgaggactacaccatcgtggaacagtacgaacgcgccgagggccgccactccaccggcggcatggacgagctgtacaagtaaaatcaacctctggattacaaaatttgtgaaagattgactggtattcttaactatgttgctccttttacgctatgtggatacgctgctttaatgcctttgtatcatgcgttaactaaacttgtttattgcagcttataatggttacaaataaagcaatagcatcacaaatttcacaaataaagcatttttttcactgcattctagttgtggtttgtccaaactcatcaatgtatcttatcatgtctggaattgactcaaatgatgtcaattagtctatcagaagctcatctggtctcccttccgggggacaagacatccctgtttaatatttaaacagcagtgttcccaaactgggttcttatatcccttgctctggtcaaccaggttgcagggtttcctgtcctcacaggaacgaagtccctaaagaaacagtggcagccaggtttagccccggaattgactggattccttttttagggcccattggtatggctttttccccgtatccccccaggtgtctgcaggctcaaagagcagcgagaagcgttcagaggaaagcgatcccgtgccaccttccccgtgcccgggctgtccccgcacgctgccggctcggggatgcggggggagcgccggaccggagcggagccccgggcggctcgctgctgccccctagcgggggagggacgtaattacatccctgggggctttgggggggggctgtccctgatatctataacaagaaaatatatatataataagttatcacgtaagtagaacatgaaataacaatataattatcgtatgagttaaatcttaaaagtcacgtaaaagataatcatgcgtcattttgactcacgcggtcgttatagttcaaaatcagtgacacttaccgcattgacaagcacgcctcacgggagctccaagcggcgactgagatgtcctaaatgcacagcgacggattcgcgctatttagaaagagagagcaatatttcaagaatgcatgcgtcaattttacgcagactatctttctagggttaatctagctgcatcaggatcatatcgtcgggtcttttttccggctcagtcatcgcccaagctggcgctatctgggcatcggggaggaagaagcccgtgccttttcccgcgaggttgaagcggcatggaaagagtttgccgaggatgactgctgctgcattgacgttgagcgaaaacgcacgtttaccatgatgattcgggaaggtgtggccatgcacgcctttaacggtgaactgttcgttcaggccacctgggataccagttcgtcgcggcttttccggacacagttccggatggtcagcccgaagcgcatcagcaacccgaacaataccggcgacagccggaactgccgtgccggtgtgcagattaatgacagcggtgcggcgctgggatattacgtcagcgaggacgggtatcctggctggatgccgcagaaatggacatggataccccgtgagttacccggcgggcgcgcttggcgtaatcatggtcatagctgtttcctgtgtgaaattgttatccgctcacaattccacacaacatacgagccggaagcataaagtgtaaagcctggggtgcctaatgagtgagctaactcacattaattgcgttgcgctcactgcccgctttccagtcgggaaacctgtcgtgccagctgcattaatgaatcggccaacgcgcggggagaggcggtttgcgtattgggcgctcttccgcttcctcgctcactgactcgctgcgctcggtcgttcggctgcggcgagcggtatcagctcactcaaaggcggtaatacggttatccacagaatcaggggataacgcaggaaagaacatgtgagcaaaaggccagcaaaaggccaggaaccgtaaaaaggccgcgttgctggcgtttttccataggctccgcccccctgacgagcatcacaaaaatcgacgctcaagtcagaggtggcgaaacccgacaggactataaagataccaggcgtttccccctggaagctccctcgtgcgctctcctgttccgaccctgccgcttaccggatacctgtccgcctttctcccttcgggaagcgtggcgctttctcatagctcacgctgtaggtatctcagttcggtgtaggtcgttcgctccaagctgggctgtgtgcacgaaccccccgttcagcccgaccgctgcgccttatccggtaactatcgtcttgagtccaacccggtaagacacgacttatcgccactggcagcagccactggtaacaggattagcagagcgaggtatgtaggcggtgctacagagttcttgaagtggtggcctaactacggctacactagaaggacagtatttggtatctgcgctctgctgaagccagttaccttcggaaaaagagttggtagctcttgatccggcaaacaaaccaccgctggtagcggtggtttttttgtttgcaagcagcagattacgcgcagaaaaaaaggatctcaagaagatcctttgatcttttctacggggtctgacgctcagtggaacgaaaactcacgttaagggattttggtcatgagattatcaaaaaggatcttcacctagatccttttaaattaaaaatgaagttttaaatcaatctaaagtatatatgagtaaacttggtctgacagttaccaatgcttaatcagtgaggcacctatctcagcgatctgtctatttcgttcatccatagttgcctgactccccgtcgtgtagataactacgatacgggagggcttaccatctggccccagtgctgcaatgataccgcgagacccacgctcaccggctccagatttatcagcaataaaccagccagccggaagggccgagcgcagaagtggtcctgcaactttatccgcctccatccagtctattaattgttgccgggaagctagagtaagtagttcgccagttaatagtttgcgcaacgttgttgccattgctacaggcatcgtggtgtcacgctcgtcgtttggtatggcttcattcagctccggttcccaacgatcaaggcgagttacatgatcccccatgttgtgcaaaaaagcggttagctccttcggtcctccgatcgttgtcagaagtaagttggccgcagtgttatcactcatggttatggcagcactgcataattctcttactgtcatgccatccgtaagatgcttttctgtgactggtgagtactcaaccaagtcattctgagaatagtgtatgcggcgaccgagttgctcttgcccggcgtcaatacgggataataccgcgccacatagcagaactttaaaagtgctcatcattggaaaacgttcttcggggcgaaaactctcaaggatcttaccgctgttgagatccagttcgatgtaacccactcgtgcacccaactgatcttcagcatcttttactttcaccagcgtttctgggtgagcaaaaacaggaaggcaaaatgccgcaaaaaagggaataagggcgacacggaaatgttgaatactcat

SEQ ID NO: 83 - DNA, 10537 bp, Artificial Sequence
  Description of Artificial Sequence: Synthetic polynucleotide
actcttcctttttcaatattattgaagcatttatcagggttattgtctcatgagcggatacatatttgaatgtatttagaaaaataaacaaataggggttccgcgcacatttccccgaaaagtgccacctaaattgtaagcgttaatattttgttaaaattcgcgttaaatttttgttaaatcagctcattttttaaccaataggccgaaatcggcaaaatcccttataaatcaaaagaatagaccgagatagggttgagtgttgttccagtttggaacaagagtccactattaaagaacgtggactccaacgtcaaagggcgaaaaaccgtctatcagggcgatggcccactacgtgaaccatcaccctaatcaagttttttggggtcgaggtgccgtaaagcactaaatcggaaccctaaagggagcccccgatttagagcttgacggggaaagccggcgaacgtggcgagaaaggaagggaagaaagcgaaaggagcgggcgctagggcgctggcaagtgtagcggtcacgctgcgcgtaaccaccacacccgccgcgcttaatgcgccgctacagggcgcgtcccattcgccattcaggctgcgcaactgttgggaagggcgatcggtgcgggcctcttcgctattacgccagctggcgaaagggggatgtgctgcaaggcgattaagttgggtaacgccagggttttcccagtcacgacgttgtaaaacgacggccagtgagcgcgcctcgttcattcacgtttttgaacccgtggaggacgggcagactcgcggtgcaaatgtgttttacagcgtgatggagcagatgaagatgctcgacacgctgcagaacacgcagctagattaaccctagaaagataatcatattgtgacgtacgttaaagataatcatgtgtaaaattgacgcatgtgttttatcggtctgtatatcgaggtttatttattaatttgaatagatattaagttttattatatttacacttacatactaataataaattcaacaaacaatttatttatgtttatttatttattaaaaaaaacaaaaactcaaaatttcttctataaagtaacaaaacttttatgagggacagcccccccccaaagcccccagggatgtaattacgtccctcccccgctagggggcagcagcgagccgcccggggctccgctccggtccggcgctccccccgcatccccgagccggcagcgtgcggggacagcccgggcacggggaaggtggcacgggatcgctttcctctgaacgcttctcgctgctctttgagcctgcagacacctggggggatacggggaaaaggcctccacggccaaaaaaatcgacctgttctcgaacatggcattgggaacacgttttagtccccttcgtttttggggtagtctaaatcggtgtttcgtcctttccacaagatatataaagccaagaaatcgaaatactttcaagttacggtaagcatatgatagtccattttaaaacataattttaaaactgcaaactacccaagaaattattactttctacgtcacgtattttgtactaatatctttgtgtttacagtcaaattaattctaattatctctctaacagccttgtatcgtatatgcaaatatgaaggaatcatgggaaataggccctcttcctgcccgacctgactagtactttcacttttctctatcactgatagggagtggtaaactcgactttcacttttctctatcactgatagggagtggtaaactcgactttcacttttctctatcactgatagggagtggtaaactcgactttcacttttctctatcactgatagggagtggtaaactcgactttcacttttctctatcactgatagggagtggtaaactcgactttcacttttctctatcactgatagggagtggtaaactcgactttcacttttctctatcactgatagggagtggtaaactcgacctatataagcagagctcgtttagtgaaccgtcagatcgcctggagacgccatccacgctgttttgacctccatagaagacaccgggaccgatccagcctccgcggccccgaattcatgccagagccagcgaagtctgctcccgccccgaaaaagggctccaagaaggcggtgactaaggcgcagaagaaaggcggcaagaagcgcaagcgcagccgcaaggagagctattccatctatgtgtacaaggttctgaagcaggtccaccctgacaccggcatttcgtccaaggccatgggcatcatgaattcgtttgtgaacgacattttcgagcgcatcgcaggtgaggcttcccgcctggcgcattacaacaagcgctcgaccatcacctccagggagatccagacggccgtgcgcctgctgctgcctggggagttggccaagcacgccgtgtccgagggtactaaggccatcaccaagtacaccagcgctaaggatccccgggtaccggtcgccaccatggtgagcaagggcgaggagctgttcaccggggtggtgcccatcctggtcgagctggacggcgacgtaaacggccacaagttcagcgtgtccggcgagggcgagggcgatgccacctacggcaagctgaccctgaagttcatctgcaccaccggcaagctgcccgtgccctggcccaccctcgtgaccaccttcggctacggcctgatgtgcttcgcccgctaccccgaccacatgaagcagcacgacttcttcaagtccgccatgcccgaaggctacgtccaggagcgcaccatcttcttcaaggacgacggcaactacaagacccgcgccgaggtgaagttcgagggcgacaccctggtgaaccgcatcgagctgaagggcatcgacttcaaggaggacggcaacatcctggggcacaagctggagtacaactacaacagccacaacgtctatatcatggccgacaagcagaagaacggcatcaaggtgaacttcaagatccgccacaacatcgaggacggcagcgtgcagctcgccgaccactaccagcagaacacccccatcggcgacggccccgtgctgctgcccgacaaccactacctgagctaccagtccgccctgagcaaagaccccaacgagaagcgcgatcacatggtcctgctggagttcgtgaccgccgccgggatcactctcggcatggacgagctgtacaagtaatctagagctagcgcatatgtccacttaagggcgctgacatgcgcatgtgaggatcaattcttacgctgagtacttcgattcctcaaatagcaagacagcccacatggcattccacttatcactggcatcctagatctgatagctttgttctcaaagtctcgagaaattcgaatttaaatcggcctcgactgtgccttctagttgccagccatctgttgtttgcccctcccccgtgccttccttgaccctggaaggtgccactcccactgtcctttcctaataaaatgaggaaattgcatcgcattgtctgagtaggtgtcattctattctggggggtggggtggggcaggacagcaagggggaggattgggaagacaatagcaggcatgctggggacgcggccgcgaaggatctgcgatcgctccggtgcccgtcagtgggcagagcgcacatcgcccacagtccccgagaagttggggggaggggtcggcaattgaacgggtgcctagagaaggtggcgcggggtaaactgggaaagtgatgtcgtgtactggctccgcctttttcccgagggtgggggagaaccgtatataagtgcagtagtcgccgtgaacgttctttttcgcaacgggtttgccgccagaacacagctgaagcttcgaggggctcgcatctctccttcacgcgcccgccgccctacctgaggccgccatccacgccggttgagtcgcgttctgccgcctcccgcctgtggtgcctcctgaactgcgtccgccgtctaggtaagtttaaagctcaggtcgagaccgggcctttgtccggcgctcccttggagcctacctagactcagccggctctccacgctttgcctgaccctgcttgctcaactctacgtctttgtttcgttttctgttctgcgccgttacagatccaagctgtgaccggcgcctacgctagatgaccgagtacaagcccacggtgcgcctcgccacccgcgacgacgtccccagggccgtacgcaccctcgccgccgcgttcgccgactaccccgccacgcgccacaccgtcgatccggaccgccacatcgagcgggtcaccgagctgcaagaactcttcctcacgcgcgtcgggctcgacatcggcaaggtgtgggtcgcggacgacggcgccgcggtggcggtctggaccacgccggagagcgtcgaagcgggggcggtgttcgccgagatcggcccgcgcatggccgagttgagcggttcccggctggccgcgcagcaacagatggaaggcctcctggcgccgcaccggcccaaggagcccgcgtggttcctggccaccgtcggcgtctcgcccgaccaccagggcaagggtctgggcagcgccgtcgtgctccccggagtggaggcggccgagcgcgccggggtgcccgccttcctggagacctccgcgccccgcaacctccccttctacgagcggctcggcttcaccgtcaccgccgacgtcgaggtgcccgaaggaccgcgcacctggtgcatgacccgcaagcccggtgccggaagcggagctactaacttcagcctgctgaagcaggctggagacgtggaggagaaccctggacctatgtctagactggacaagagcaaagtcataaacggcgctctggaattactcaatggagtcggtatcgaaggcctgacgacaaggaaactcgctcaaaagctgggagttgagcagcctaccctgtactggcacgtgaagaacaagcgggccctgctcgatgccctgccaatcgagatgctggacaggcatcatacccacttctgccccctggaaggcgagtcatggcaagactttctgcggaacaacgccaagtcattccgctgtgctctcctctcacatcgcgacggggctaaagtgcatctcggcacccgcccaacagagaaacagtacgaaaccctggaaaatcagctcgcgttcctgtgtcagcaaggcttctccctggagaacgcactgtacgctctgtccgccgtgggccactttacactgggctgcgtattggaggaacaggagcatcaagtagcaaaagaggaaagagagacacctaccaccgattctatgcccccacttctgagacaagcaattgagctgttcgaccggcagggagccgaacctgccttccttttcggcctggaactaatcatatgtggcctggagaaacagctaaagtgcgaaagcggcgggccggccgacgcccttgacgattttgacttagacatgctcccagccgatgcccttgacgactttgaccttgatatgctgcctgctgacgctcttgacgattttgaccttgacatgctccccgggtaactaagtaaccctctccctcccccccccctaacgttactggccgaagccgcttggaataaggccggtgtgcgtttgtctatatgttattttccaccatattgccgtcttttggcaatgtgagggcccggaaacctggccctgtcttcttgacgagcattcctaggggtctttcccctctcgccaaaggaatgcaaggtctgttgaatgtcgtgaaggaagcagttcctctggaagcttcttgaagacaaacaacgtctgtagcgaccctttgcaggcagcggaaccccccacctggcgacaggtgcctctgcggccaaaagccacgtgtataagatacacctgcaaaggcggcacaaccccagtgccacgttgtgagttggatagttgtggaaagagtcaaatggctctcctcaagcgtattcaacaaggggctgaaggatgcccagaaggtaccccattgtatgggatctgatctggggcctcggtgcacatgctttacatgtgtttagtcgaggttaaaaaaacgtctaggccccccgaaccacggggacgtggttttcctttgaaaaacacgatgataatatggccacaaccatggtctctaaaggaggttcgtccgacgacgaagcaacagcggactcgcagcacgccgcacctcctaagaagaaaaggaaggtaggggatccccgggtaccggtcgccaccatggccatcatcaaggagttcatgcgcttcaaggtgcacatggagggctccgtgaacggccacgagttcgagatcgagggcgagggcgagggccgcccctacgagggcacccagaccgccaagctgaaggtgaccaagggtggccccctgcccttcgcctgggacatcctgtcccctcagttcatgtacggctccaaggcctacgtgaagcaccccgccgacatccccgactacttgaagctgtccttccccgagggcttcaagtgggagcgcgtgatgaacttcgaggacggcggcgtggtgaccgtgacccaggactcctccctgcaggacggcgagttcatctacaaggtgaagctgcgcggcaccaacttcccctccgacggccccgtaatgcagaagaagaccatgggctgggaggcctcctccgagcggatgtaccccgaggacggcgccctgaagggcgagatcaagcagaggctgaagctgaaggacggcggccactacgacgctgaggtcaagaccacctacaaggccaagaagcccgtgcagctgcccggcgcctacaacgtcaacatcaagttggacatcacctcccacaacgaggactacaccatcgtggaacagtacgaacgcgccgagggccgccactccaccggcggcatggacgagctgtacaagtaaaatcaacctctggattacaaaatttgtgaaagattgactggtattcttaactatgttgctccttttacgctatgtggatacgctgctttaatgcctttgtatcatgcgttaactaaacttgtttattgcagcttataatggttacaaataaagcaatagcatcacaaatttcacaaataaagcatttttttcactgcattctagttgtggtttgtccaaactcatcaatgtatcttatcatgtctggaattgactcaaatgatgtcaattagtctatcagaagctcatctggtctcccttccgggggacaagacatccctgtttaatatttaaacagcagtgttcccaaactgggttcttatatcccttgctctggtcaaccaggttgcagggtttcctgtcctcacaggaacgaagtccctaaagaaacagtggcagccaggtttagccccggaattgactggattccttttttagggcccattggtatggctttttccccgtatccccccaggtgtctgcaggctcaaagagcagcgagaagcgttcagaggaaagcgatcccgtgccaccttccccgtgcccgggctgtccccgcacgctgccggctcggggatgcggggggagcgccggaccggagcggagccccgggcggctcgctgctgccccctagcgggggagggacgtaattacatccctgggggctttgggggggggctgtccctgatatctataacaagaaaatatatatataataagttatcacgtaagtagaacatgaaataacaatataattatcgtatgagttaaatcttaaaagtcacgtaaaagataatcatgcgtcattttgactcacgcggtcgttatagttcaaaatcagtgacacttaccgcattgacaagcacgcctcacgggagctccaagcggcgactgagatgtcctaaatgcacagcgacggattcgcgctatttagaaagagagagcaatatttcaagaatgcatgcgtcaattttacgcagactatctttctagggttaatctagctgcatcaggatcatatcgtcgggtcttttttccggctcagtcatcgcccaagctggcgctatctgggcatcggggaggaagaagcccgtgccttttcccgcgaggttgaagcggcatggaaagagtttgccgaggatgactgctgctgcattgacgttgagcgaaaacgcacgtttaccatgatgattcgggaaggtgtggccatgcacgcctttaacggtgaactgttcgttcaggccacctgggataccagttcgtcgcggcttttccggacacagttccggatggtcagcccgaagcgcatcagcaacccgaacaataccggcgacagccggaactgccgtgccggtgtgcagattaatgacagcggtgcggcgctgggatattacgtcagcgaggacgggtatcctggctggatgccgcagaaatggacatggataccccgtgagttacccggcgggcgcgcttggcgtaatcatggtcatagctgtttcctgtgtgaaattgttatccgctcacaattccacacaacatacgagccggaagcataaagtgtaaagcctggggtgcctaatgagtgagctaactcacattaattgcgttgcgctcactgcccgctttccagtcgggaaacctgtcgtgccagctgcattaatgaatcggccaacgcgcggggagaggcggtttgcgtattgggcgctcttccgcttcctcgctcactgactcgctgcgctcggtcgttcggctgcggcgagcggtatcagctcactcaaaggcggtaatacggttatccacagaatcaggggataacgcaggaaagaacatgtgagcaaaaggccagcaaaaggccaggaaccgtaaaaaggccgcgttgctggcgtttttccataggctccgcccccctgacgagcatcacaaaaatcgacgctcaagtcagaggtggcgaaacccgacaggactataaagataccaggcgtttccccctggaagctccctcgtgcgctctcctgttccgaccctgccgcttaccggatacctgtccgcctttctcccttcgggaagcgtggcgctttctcatagctcacgctgtaggtatctcagttcggtgtaggtcgttcgctccaagctgggctgtgtgcacgaaccccccgttcagcccgaccgctgcgccttatccggtaactatcgtcttgagtccaacccggtaagacacgacttatcgccactggcagcagccactggtaacaggattagcagagcgaggtatgtaggcggtgctacagagttcttgaagtggtggcctaactacggctacactagaaggacagtatttggtatctgcgctctgctgaagccagttaccttcggaaaaagagttggtagctcttgatccggcaaacaaaccaccgctggtagcggtggtttttttgtttgcaagcagcagattacgcgcagaaaaaaaggatctcaagaagatcctttgatcttttctacggggtctgacgctcagtggaacgaaaactcacgttaagggattttggtcatgagattatcaaaaaggatcttcacctagatccttttaaattaaaaatgaagttttaaatcaatctaaagtatatatgagtaaacttggtctgacagttaccaatgcttaatcagtgaggcacctatctcagcgatctgtctatttcgttcatccatagttgcctgactccccgtcgtgtagataactacgatacgggagggcttaccatctggccccagtgctgcaatgataccgcgagacccacgctcaccggctccagatttatcagcaataaaccagccagccggaagggccgagcgcagaagtggtcctgcaactttatccgcctccatccagtctattaattgttgccgggaagctagagtaagtagttcgccagttaatagtttgcgcaacgttgttgccattgctacaggcatcgtggtgtcacgctcgtcgtttggtatggcttcattcagctccggttcccaacgatcaaggcgagttacatgatcccccatgttgtgcaaaaaagcggttagctccttcggtcctccgatcgttgtcagaagtaagttggccgcagtgttatcactcatggttatggcagcactgcataattctcttactgtcatgccatccgtaagatgcttttctgtgactggtgagtactcaaccaagtcattctgagaatagtgtatgcggcgaccgagttgctcttgcccggcgtcaatacgggataataccgcgccacatagcagaactttaaaagtgctcatcattggaaaacgttcttcggggcgaaaactctcaaggatcttaccgctgttgagatccagttcgatgtaacccactcgtgcacccaactgatcttcagcatcttttactttcaccagcgtttctgggtgagcaaaaacaggaaggcaaaatgccgcaaaaaagggaataagggcgacacggaaatgttgaatactcat

SEQ ID NO: 84 - DNA, 10382 bp, Artificial Sequence
  Description of Artificial Sequence: Synthetic polynucleotide
actcttcctttttcaatattattgaagcatttatcagggttattgtctcatgagcggatacatatttgaatgtatttagaaaaataaacaaataggggttccgcgcacatttccccgaaaagtgccacctaaattgtaagcgttaatattttgttaaaattcgcgttaaatttttgttaaatcagctcattttttaaccaataggccgaaatcggcaaaatcccttataaatcaaaagaatagaccgagatagggttgagtgttgttccagtttggaacaagagtccactattaaagaacgtggactccaacgtcaaagggcgaaaaaccgtctatcagggcgatggcccactacgtgaaccatcaccctaatcaagttttttggggtcgaggtgccgtaaagcactaaatcggaaccctaaagggagcccccgatttagagcttgacggggaaagccggcgaacgtggcgagaaaggaagggaagaaagcgaaaggagcgggcgctagggcgctggcaagtgtagcggtcacgctgcgcgtaaccaccacacccgccgcgcttaatgcgccgctacagggcgcgtcccattcgccattcaggctgcgcaactgttgggaagggcgatcggtgcgggcctcttcgctattacgccagctggcgaaagggggatgtgctgcaaggcgattaagttgggtaacgccagggttttcccagtcacgacgttgtaaaacgacggccagtgagcgcgcctcgttcattcacgtttttgaacccgtggaggacgggcagactcgcggtgcaaatgtgttttacagcgtgatggagcagatgaagatgctcgacacgctgcagaacacgcagctagattaaccctagaaagataatcatattgtgacgtacgttaaagataatcatgtgtaaaattgacgcatgtgttttatcggtctgtatatcgaggtttatttattaatttgaatagatattaagttttattatatttacacttacatactaataataaattcaacaaacaatttatttatgtttatttatttattaaaaaaaacaaaaactcaaaatttcttctataaagtaacaaaacttttatgagggacagcccccccccaaagcccccagggatgtaattacgtccctcccccgctagggggcagcagcgagccgcccggggctccgctccggtccggcgctccccccgcatccccgagccggcagcgtgcggggacagcccgggcacggggaaggtggcacgggatcgctttcctctgaacgcttctcgctgctctttgagcctgcagacacctggggggatacggggaaaaggcctccacggccactagttctaccgggtaggggaggcgcttttcccaaggcagtctggagcatgcgctttagcagccccgctgggcacttggcgctacacaagtggcctctggcctcgcacacattccacatccaccggtaggcgccaaccggctccgttctttggtggccccttcgcgccaccttctactcctcccctagtcaggaagttcccccccgccccgcagctcgcgtcgtgcaggacgtgacaaatggaagtagcacgtctcattagtctcgtgcagatggacagcaccgctgagcaatggaagcgggtaggcctttggggcagcggccaatagcagctttgctccttcgctttctgggctcagaggctgggaaggggtgggtccgggggcgggctcaggggcgggctcaggggcggggcgggcgcccgaaggtcctccggaggcccggcattctgcacgcttcaaaagcgcacgtctgccgcgctgttctcctcttcctcatctccgggcctttcgacctgcaggttaattaaatgggtaagcctatccctaaccctctcctcggtctcgattctacggctagcatgaacatccccgctctggtggaaaaccagaagaagtactttggcacctacagcgtgatggccatgctgaacgctcagaccgtgctggaccacatccagaaggtggccgatattgagggcgagcagaacgagaacaacgagaatctgtggtttcaccccgtgatgagccacctgtacaacgccaagaacggctacgacaagcagcccgagaaaaccatgttcatcatcgagcggctgcagagctacttcccattcctgaagatcatggccgagaaccagagagagtacagcaacggcaagtacaagcagaaccgcgtggaagtgaacagcaacgacatcttcgaggtgctgaagcgcgccttcggcgtgctgaagatgtacagggacctgaccaacgcatacaagacctacgaggaaaagctgaacgacggctgcgagttcctgaccagcacagagcaacctctgagcggcatgatcaacaactactacacagtggccctgcggaacatgaacgagagatacggctacaagacagaggacctggccttcatccaggacaagcggttcaagttcgtgaaggacgcctacggcaagaaaaagtcccaagtgaataccggattcttcctgagcctgcaggactacaacggcgacacacagaagaagctgcacctgagcggagtgggaatcgccctgctgatctgcctgttcctggacaagcagtacatcaacatctttctgagcaggctgcccatcttctccagctacaatgcccagagcgaggaacggcggatcatcatcagatccttcggcatcaacagcatcaagctgcccaaggaccggatccacagcgagaagtccaacaagagcgtggccatggatatgctcaacgaagtgaagcggtgccccgacgagctgttcacaacactgtctgccgagaagcagtcccggttcagaatcatcagcgacgaccacaatgaagtgctgatgaagcggagcagcgacagattcgtgcctctgctgctgcagtatatcgattacggcaagctgttcgaccacatcaggttccacgtgaacatgggcaagctgagatacctgctgaaggccgacaagacctgcatcgacggccagaccagagtcagagtgatcgagcagcccctgaacggcttcggcagactggaagaggccgagacaatgcggaagcaagagaacggcaccttcggcaacagcggcatccggatcagagacttcgagaacatgaagcgggacgacgccaatcctgccaactatccctacatcgtggacacctacacacactacatcctggaaaacaacaaggtcgagatgtttatcaacgacaaagaggacagcgccccactgctgcccgtgatcgaggatgatagatacgtggtcaagacaatccccagctgccggatgagcaccctggaaattccagccatggccttccacatgtttctgttcggcagcaagaaaaccgagaagctgatcgtggacgtgcacaaccggtacaagagactgttccaggccatgcagaaagaagaagtgaccgccgagaatatcgccagcttcggaatcgccgagagcgacctgcctcagaagatcctggatctgatcagcggcaatgcccacggcaaggatgtggacgccttcatcagactgaccgtggacgacatgctgaccgacaccgagcggagaatcaagagattcaaggacgaccggaagtccattcggagcgccgacaacaagatgggaaagagaggcttcaagcagatctccacaggcaagctggccgacttcctggccaaggacatcgtgctgtttcagcccagcgtgaacgatggcgagaacaagatcaccggcctgaactaccggatcatgcagagcgccattgccgtgtacgatagcggcgacgattacgaggccaagcagcagttcaagctgatgttcgagaaggcccggctgatcggcaagggcacaacagagcctcatccatttctgtacaaggtgttcgcccgcagcatccccgccaatgccgtcgagttctacgagcgctacctgatcgagcggaagttctacctgaccggcctgtccaacgagatcaagaaaggcaacagagtggatgtgcccttcatccggcgggaccagaacaagtggaaaacacccgccatgaagaccctgggcagaatctacagcgaggatctgcccgtggaactgcccagacagatgttcgacaatgagatcaagtcccacctgaagtccctgccacagatggaaggcatcgacttcaacaatgccaacgtgacctatctgatcgccgagtacatgaagagagtgctggacgacgacttccagaccttctaccagtggaaccgcaactaccggtacatggacatgcttaagggcgagtacgacagaaagggctccctgcagcactgcttcaccagcgtggaagagagagaaggcctctggaaagagcgggcctccagaacagagcggtacagaaagcaggccagcaacaagatccgcagcaaccggcagatgagaaacgccagcagcgaagagatcgagacaatcctggataagcggctgagcaacagccggaacgagtaccagaaaagcgagaaagtgatccggcgctacagagtgcaggatgccctgctgtttctgctggccaaaaagaccctgaccgaactggccgatttcgacggcgagaggttcaaactgaaagaaatcatgcccgacgccgagaagggaatcctgagcgagatcatgcccatgagcttcaccttcgagaaaggcggcaagaagtacaccatcaccagcgagggcatgaagctgaagaactacggcgacttctttgtgctggctagcgacaagaggatcggcaacctgctggaactcgtgggcagcgacatcgtgtccaaagaggatatcatggaagagttcaacaaatacgaccagtgcaggcccgagatcagctccatcgtgttcaacctggaaaagtgggccttcgacacataccccgagctgtctgccagagtggaccgggaagagaaggtggacttcaagagcatcctgaaaatcctgctgaacaacaagaacatcaacaaagagcagagcgacatcctgcggaagatccggaacgccttcgatgcaaacaattaccccgacaaaggcgtggtggaaatcaaggccctgcctgagatcgccatgagcatcaagaaggcctttggggagtacgccatcatgaagggatcccttcaactgcctccacttgaaagactgacactgctcgagagagattagatctgttggacgatgatcggagagtgactgggtttagtataaccggtggtgaacataggctgaggaattataaatcggttacgacggttcatagatttgagaaagaagaagaagaagaaaggatctggaccgttgttttggaatcttatgttgttgatgtaccggaaggtaattcggaggaagatacgagattgtttgctgatacggttattagattgaatcttcagaaacttgcttcgatcactgaagctatgaactctagacttaagcaacatgctgctccgccgaaaaagaagagaaaaggttaagcctcgactgtgccttctagttgccagccatctgttgtttgcccctcccccgtgccttccttgaccctggaaggtgccactcccactgtcctttcctaataaaatgaggaaattgcatcgcattgtctgagtaggtgtcattctattctggggggtggggtggggcaggacagcaagggggaggattgggaagacaatagcaggcatgctggggagtgcccgtcagtgggcagagcgcacatcgcccacagtccccgagaagttggggggaggggtcggcaattgaacgggtgcctagagaaggtggcgcggggtaaactgggaaagtgatgtcgtgtactggctccgcctttttcccgagggtgggggagaaccgtatataagtgcagtagtcgccgtgaacgttctttttcgcaacgggtttgccgccagaacacagatggtctctaaaggaggttcgtccgacgacgaagcaacagcggactcgcagcacgccgcacctcctaagaagaaaaggaaggtaggggatccccgggtaccggtcgccaccatggtgagcaagggcgaggagctgttcaccggggtggtgcccatcctggtcgagctggacggcgacgtaaacggccacaagttcagcgtgtccggcgagggcgagggcgatgccacctacggcaagctgaccctgaagttcatctgcaccaccggcaagctgcccgtgccctggcccaccctcgtgaccaccctgtcctggggcgtgcagtgcttcgcccgctaccccgaccacatgaagcagcacgacttcttcaagtccgccatgcccgaaggctacgtccaggagcgcaccatcttcttcaaggacgacggcaactacaagacccgcgccgaggtgaagttcgagggcgacaccctggtgaaccgcatcgagctgaagggcatcgacttcaaggaggacggcaacatcctggggcacaagctggagtacaactactttagcgacaacgtctatatcaccgccgacaagcagaagaacggcatcaaggccaacttcaagatccgccacaacatcgaggacggcggcgtgcagctcgccgaccactaccagcagaacacccccatcggcgacggccccgtgctgctgcccgacaaccactacctgagcacccagtccaagctgagcaaagaccccaacgagaagcgcgatcacatggtcctgctggagttcgtgaccgccgccgggatcactctcggcatggacgagctgtacaagtaaaatcaacctctggattacaaaatttgtgaaagattgactggtattcttaactatgttgctccttttacgctatgtggatacgctgctttaatgcctttgtatcatgttaactaaacttgtttattgcagcttataatggttacaaataaagcaatagcatcacaaatttcacaaataaagcatttttttcactgcattctagttgtggtttgtccaaactcatcaatgtatcttatcatgtctggaattgactcaaatgatgtcaattagtctatcagaagctcatctggtctcccttccgggggacaagacatccctgtttaatatttaaacagcagtgttcccaaactgggttcttatatcccttgctctggtcaaccaggttgcagggtttcctgtcctcacaggaacgaagtccctaaagaaacagtggcagccaggtttagccccggaattgactggattccttttttagggcccattggtatggctttttccccgtatccccccaggtgtctgcaggctcaaagagcagcgagaagcgttcagaggaaagcgatcccgtgccaccttccccgtgcccgggctgtccccgcacgctgccggctcggggatgcggggggagcgccggaccggagcggagccccgggcggctcgctgctgccccctagcgggggagggacgtaattacatccctgggggctttgggggggggctgtccctgatatctataacaagaaaatatatatataataagttatcacgtaagtagaacatgaaataacaatataattatcgtatgagttaaatcttaaaagtcacgtaaaagataatcatgcgtcattttgactcacgcggtcgttatagttcaaaatcagtgacacttaccgcattgacaagcacgcctcacgggagctccaagcggcgactgagatgtcctaaatgcacagcgacggattcgcgctatttagaaagagagagcaatatttcaagaatgcatgcgtcaattttacgcagactatctttctagggttaatctagctgcatcaggatcatatcgtcgggtcttttttccggctcagtcatcgcccaagctggcgctatctgggcatcggggaggaagaagcccgtgccttttcccgcgaggttgaagcggcatggaaagagtttgccgaggatgactgctgctgcattgacgttgagcgaaaacgcacgtttaccatgatgattcgggaaggtgtggccatgcacgcctttaacggtgaactgttcgttcaggccacctgggataccagttcgtcgcggcttttccggacacagttccggatggtcagcccgaagcgcatcagcaacccgaacaataccggcgacagccggaactgccgtgccggtgtgcagattaatgacagcggtgcggcgctgggatattacgtcagcgaggacgggtatcctggctggatgccgcagaaatggacatggataccccgtgagttacccggcgggcgcgcttggcgtaatcatggtcatagctgtttcctgtgtgaaattgttatccgctcacaattccacacaacatacgagccggaagcataaagtgtaaagcctggggtgcctaatgagtgagctaactcacattaattgcgttgcgctcactgcccgctttccagtcgggaaacctgtcgtgccagctgcattaatgaatcggccaacgcgcggggagaggcggtttgcgtattgggcgctcttccgcttcctcgctcactgactcgctgcgctcggtcgttcggctgcggcgagcggtatcagctcactcaaaggcggtaatacggttatccacagaatcaggggataacgcaggaaagaacatgtgagcaaaaggccagcaaaaggccaggaaccgtaaaaaggccgcgttgctggcgtttttccataggctccgcccccctgacgagcatcacaaaaatcgacgctcaagtcagaggtggcgaaacccgacaggactataaagataccaggcgtttccccctggaagctccctcgtgcgctctcctgttccgaccctgccgcttaccggatacctgtccgcctttctcccttcgggaagcgtggcgctttctcatagctcacgctgtaggtatctcagttcggtgtaggtcgttcgctccaagctgggctgtgtgcacgaaccccccgttcagcccgaccgctgcgccttatccggtaactatcgtcttgagtccaacccggtaagacacgacttatcgccactggcagcagccactggtaacaggattagcagagcgaggtatgtaggcggtgctacagagttcttgaagtggtggcctaactacggctacactagaaggacagtatttggtatctgcgctctgctgaagccagttaccttcggaaaaagagttggtagctcttgatccggcaaacaaaccaccgctggtagcggtggtttttttgtttgcaagcagcagattacgcgcagaaaaaaaggatctcaagaagatcctttgatcttttctacggggtctgacgctcagtggaacgaaaactcacgttaagggattttggtcatgagattatcaaaaaggatcttcacctagatccttttaaattaaaaatgaagttttaaatcaatctaaagtatatatgagtaaacttggtctgacagttaccaatgcttaatcagtgaggcacctatctcagcgatctgtctatttcgttcatccatagttgcctgactccccgtcgtgtagataactacgatacgggagggcttaccatctggccccagtgctgcaatgataccgcgagacccacgctcaccggctccagatttatcagcaataaaccagccagccggaagggccgagcgcagaagtggtcctgcaactttatccgcctccatccagtctattaattgttgccgggaagctagagtaagtagttcgccagttaatagtttgcgcaacgttgttgccattgctacaggcatcgtggtgtcacgctcgtcgtttggtatggcttcattcagctccggttcccaacgatcaaggcgagttacatgatcccccatgttgtgcaaaaaagcggttagctccttcggtcctccgatcgttgtcagaagtaagttggccgcagtgttatcactcatggttatggcagcactgcataattctcttactgtcatgccatccgtaagatgcttttctgtgactggtgagtactcaaccaagtcattctgagaatagtgtatgcggcgaccgagttgctcttgcccggcgtcaatacgggataataccgcgccacatagcagaactttaaaagtgctcatcattggaaaacgttcttcggggcgaaaactctcaaggatcttaccgctgttgagatccagttcgatgtaacccactcgtgcacccaactgatcttcagcatcttttactttcaccagcgtttctgggtgagcaaaaacaggaaggcaaaatgccgcaaaaaagggaataagggcgacacggaaatgttgaatactcat

SEQ ID NO: 85 - protein, 9 aa, Artificial Sequence
  Description of Artificial Sequence: Synthetic peptide
MDYKDDDDK

SEQ ID NO: 86 - protein, 9 aa, Artificial Sequence
  Description of Artificial Sequence: Synthetic peptide
MDYKDDDDK

SEQ ID NO: 87 - protein, 246 aa, Artificial Sequence
  Description of Artificial Sequence: Synthetic polypeptide
MVSKGEELFTGVVPILVELDGDVNGHKFSVSGEGEGDATYGKLTLKFICTTGKLPVPWPTLVTTFGYGLMCFARYPDHMKQHDFFKSAMPEGYVQERTIFFKDDGNYKTRAEVKFEGDTLVNRIELKGIDFKEDGNILGHKLEYNYNSHNVYIMADKQKNGIKVNFKIRHNIEDGSVQLADHYQQNTPIGDGPVLLPDNHYLSYQSALSKDPNEKRDHMVLLEFVTAAGITLGMDELYPYDVPDYA

SEQ ID NO: 88 - protein, 9 aa, Influenza A virus
YPYDVPDYA

SEQ ID NO: 89 - protein, 18 aa, Artificial Sequence
  Description of Artificial Sequence: Synthetic peptide
AYVHLRALTCACEDQFLR

SEQ ID NO: 90 - protein, 248 aa, Artificial Sequence
  Description of Artificial Sequence: Synthetic polypeptide
MSRLDKSKVINGALELLNGVGIEGLTTRKLAQKLGVEQPTLYWHVKNKRALLDALPIEMLDRHHTHFCPLEGESWQDFLRNNAKSFRCALLSHRDGAKVHLGTRPTEKQYETLENQLAFLCQQGFSLENALYALSAVGHFTLGCVLEEQEHQVAKEERETPTTDSMPPLLRQAIELFDRQGAEPAFLFGLELIICGLEKQLKCESGGPADALDDFDLDMLPADALDDFDLDMLPADALDDFDLDMLPG

SEQ ID NO: 91 - DNA, 10830 bp, Artificial Sequence
  Description of Artificial Sequence: Synthetic polynucleotide
actcttcctttttcaatattattgaagcatttatcagggttattgtctcatgagcggatacatatttgaatgtatttagaaaaataaacaaataggggttccgcgcacatttccccgaaaagtgccacctaaattgtaagcgttaatattttgttaaaattcgcgttaaatttttgttaaatcagctcattttttaaccaataggccgaaatcggcaaaatcccttataaatcaaaagaatagaccgagatagggttgagtgttgttccagtttggaacaagagtccactattaaagaacgtggactccaacgtcaaagggcgaaaaaccgtctatcagggcgatggcccactacgtgaaccatcaccctaatcaagttttttggggtcgaggtgccgtaaagcactaaatcggaaccctaaagggagcccccgatttagagcttgacggggaaagccggcgaacgtggcgagaaaggaagggaagaaagcgaaaggagcgggcgctagggcgctggcaagtgtagcggtcacgctgcgcgtaaccaccacacccgccgcgcttaatgcgccgctacagggcgcgtcccattcgccattcaggctgcgcaactgttgggaagggcgatcggtgcgggcctcttcgctattacgccagctggcgaaagggggatgtgctgcaaggcgattaagttgggtaacgccagggttttcccagtcacgacgttgtaaaacgacggccagtgagcgcgcctcgttcattcacgtttttgaacccgtggaggacgggcagactcgcggtgcaaatgtgttttacagcgtgatggagcagatgaagatgctcgacacgctgcagaacacgcagctagattaaccctagaaagataatcatattgtgacgtacgttaaagataatcatgtgtaaaattgacgcatgtgttttatcggtctgtatatcgaggtttatttattaatttgaatagatattaagttttattatatttacacttacatactaataataaattcaacaaacaatttatttatgtttatttatttattaaaaaaaacaaaaactcaaaatttcttctataaagtaacaaaacttttatgagggacagcccccccccaaagcccccagggatgtaattacgtccctcccccgctagggggcagcagcgagccgcccggggctccgctccggtccggcgctccccccgcatccccgagccggcagcgtgcggggacagcccgggcacggggaaggtggcacgggatcgctttcctctgaacgcttctcgctgctctttgagcctgcagacacctggggggatacggggaaaaggcctccacggccactagtactttcacttttctctatcactgatagggagtggtaaactcgactttcacttttctctatcactgatagggagtggtaaactcgactttcacttttctctatcactgatagggagtggtaaactcgactttcacttttctctatcactgatagggagtggtaaactcgactttcacttttctctatcactgatagggagtggtaaactcgactttcacttttctctatcactgatagggagtggtaaactcgactttcacttttctctatcactgatagggagtggtaaactcgacctatataagcagagctcgtttagtgaaccgtcagatcgcctggagacgccatccacgctgttttgacctccatagaagacaccgggaccgatccagcctccgcggccccgaattcatggattataaagatgatgatgataaataagcagctggaccaacggacggacgccagcgctaaggatccccgggtaccggtcgccaccatggtgagcaagggcgaggagctgttcaccggggtggtgcccatcctggtcgagctggacggcgacgtaaacggccacaagttcagcgtgtccggcgagggcgagggcgatgccacctacggcaagctgaccctgaagttcatctgcaccaccggcaagctgcccgtgccctggcccaccctcgtgaccaccttcggctacggcctgatgtgcttcgcccgctaccccgaccacatgaagcagcacgacttcttcaagtccgccatgcccgaaggctacgtccaggagcgcaccatcttcttcaaggacgacggcaactacaagacccgcgccgaggtgaagttcgagggcgacaccctggtgaaccgcatcgagctgaagggcatcgacttcaaggaggacggcaacatcctggggcacaagctggagtacaactacaacagccacaacgtctatatcatggccgacaagcagaagaacggcatcaaggtgaacttcaagatccgccacaacatcgaggacggcagcgtgcagctcgccgaccactaccagcagaacacccccatcggcgacggccccgtgctgctgcccgacaaccactacctgagctaccagtccgccctgagcaaagaccccaacgagaagcgcgatcacatggtcctgctggagttcgtgaccgccgccgggatcactctcggcatggacgagctgtacccatacgatgttccagattacgcttaagctagcgcatatgtccacttaagggcgctgacatgcgcatgtgaggatcaattcttacgctgagtacttcgattcctcaaatagcaagacagcccacatggcattccacttatcactggcatcctagatctgatagctttgttctcaaagtctcgagaaattcgaatttaaatcgacgcgtgcctcgactgtgccttctagttgccagccatctgttgtttgcccctcccccgtgccttccttgaccctggaaggtgccactcccactgtcctttcctaataaaatgaggaaattgcatcgcattgtctgagtaggtgtcattctattctggggggtggggtggggcaggacagcaagggggaggattgggaagacaatagcaggcatgctggggaaataaagcaaaaaaaaaaatatcatcgtgttcttcaaaggaaaaccacgtccccgtggttcggggggcctagacgtttttttaacctcgactaaacacatgtaaagcatgtgcaccgaggccccagatcagatcccatacaatggggtaccttctgggcatccttcagccccttgttgaatacgcttgaggagagccatttgactctttccacaactatccaactcacaacgtggcactggggttgtgccgcctttgcaggtgtatcttatacacgtggcttttggccgcagaggcacctgtcgccaggtggggggttccgctgcctgcaaagggtcgctacagacgttgtttgtcttcaagaagcttccagaggaactgcttccttcacgacattcaacagaccttgcattcctttggcgagaggggaaagacccctaggaatgctcgtcaagaagacagggccaggtttccgggccctcacattgccaaaagacggcaatatggtggaaaataacatatagacaaacgcacaccggccttattccaagcggcttcggccagtaacgttaggggggggggagggagaggggtcgacgttgtaatagcccctcaaaactggaccttccacaactagtgttctcgaacatggcattgggaacacggtgtttcgtcctttccacaagatatataaagccaagaaatcgaaatactttcaagttacggtaagcatatgatagtccattttaaaacataattttaaaactgcaaactacccaagaaattattactttctacgtcacgtattttgtactaatatctttgtgtttacagtcaaattaattctaattatctctctaacagccttgtatcgtatatgcaaatatgaaggaatcatgggaaataggccctcttcctgcccgacctcgcggccgcgaaggatctgcgatcgctccggtgcccgtcagtgggcagagcgcacatcgcccacagtccccgagaagttggggggaggggtcggcaattgaacgggtgcctagagaaggtggcgcggggtaaactgggaaagtgatgtcgtgtactggctccgcctttttcccgagggtgggggagaaccgtatataagtgcagtagtcgccgtgaacgttctttttcgcaacgggtttgccgccagaacacagctgaagcttcgaggggctcgcatctctccttcacgcgcccgccgccctacctgaggccgccatccacgccggttgagtcgcgttctgccgcctcccgcctgtggtgcctcctgaactgcgtccgccgtctaggtaagtttaaagctcaggtcgagaccgggcctttgtccggcgctcccttggagcctacctagactcagccggctctccacgctttgcctgaccctgcttgctcaactctacgtctttgtttcgttttctgttctgcgccgttacagatccaagctgtgaccggcgcctacgctagatgaccgagtacaagcccacggtgcgcctcgccacccgcgacgacgtccccagggccgtacgcaccctcgccgccgcgttcgccgactaccccgccacgcgccacaccgtcgatccggaccgccacatcgagcgggtcaccgagctgcaagaactcttcctcacgcgcgtcgggctcgacatcggcaaggtgtgggtcgcggacgacggcgccgcggtggcggtctggaccacgccggagagcgtcgaagcgggggcggtgttcgccgagatcggcccgcgcatggccgagttgagcggttcccggctggccgcgcagcaacagatggaaggcctcctggcgccgcaccggcccaaggagcccgcgtggttcctggccaccgtcggcgtctcgcccgaccaccagggcaagggtctgggcagcgccgtcgtgctccccggagtggaggcggccgagcgcgccggggtgcccgccttcctggagacctccgcgccccgcaacctccccttctacgagcggctcggcttcaccgtcaccgccgacgtcgaggtgcccgaaggaccgcgcacctggtgcatgacccgcaagcccggtgccggaagcggagctactaacttcagcctgctgaagcaggctggagacgtggaggagaaccctggacctatgtctagactggacaagagcaaagtcataaacggcgctctggaattactcaatggagtcggtatcgaaggcctgacgacaaggaaactcgctcaaaagctgggagttgagcagcctaccctgtactggcacgtgaagaacaagcgggccctgctcgatgccctgccaatcgagatgctggacaggcatcatacccacttctgccccctggaaggcgagtcatggcaagactttctgcggaacaacgccaagtcattccgctgtgctctcctctcacatcgcgacggggctaaagtgcatctcggcacccgcccaacagagaaacagtacgaaaccctggaaaatcagctcgcgttcctgtgtcagcaaggcttctccctggagaacgcactgtacgctctgtccgccgtgggccactttacactgggctgcgtattggaggaacaggagcatcaagtagcaaaagaggaaagagagacacctaccaccgattctatgcccccacttctgagacaagcaattgagctgttcgaccggcagggagccgaacctgccttccttttcggcctggaactaatcatatgtggcctggagaaacagctaaagtgcgaaagcggcgggccggccgacgcccttgacgattttgacttagacatgctcccagccgatgcccttgacgactttgaccttgatatgctgcctgctgacgctcttgacgattttgaccttgacatgctccccgggtaactaagtaaccctctccctcccccccccctaacgttactggccgaagccgcttggaataaggccggtgtgcgtttgtctatatgttattttccaccatattgccgtcttttggcaatgtgagggcccggaaacctggccctgtcttcttgacgagcattcctaggggtctttcccctctcgccaaaggaatgcaaggtctgttgaatgtcgtgaaggaagcagttcctctggaagcttcttgaagacaaacaacgtctgtagcgaccctttgcaggcagcggaaccccccacctggcgacaggtgcctctgcggccaaaagccacgtgtataagatacacctgcaaaggcggcacaaccccagtgccacgttgtgagttggatagttgtggaaagagtcaaatggctctcctcaagcgtattcaacaaggggctgaaggatgcccagaaggtaccccattgtatgggatctgatctggggcctcggtgcacatgctttacatgtgtttagtcgaggttaaaaaaacgtctaggccccccgaaccacggggacgtggttttcctttgaaaaacacgatgataatatggccacaaccatggtctctaaaggaggttcgtccgacgacgaagcaacagcggactcgcagcacgccgcacctcctaagaagaaaaggaaggtaggggatccccgggtaccggtcgccaccatggccatcatcaaggagttcatgcgcttcaaggtgcacatggagggctccgtgaacggccacgagttcgagatcgagggcgagggcgagggccgcccctacgagggcacccagaccgccaagctgaaggtgaccaagggtggccccctgcccttcgcctgggacatcctgtcccctcagttcatgtacggctccaaggcctacgtgaagcaccccgccgacatccccgactacttgaagctgtccttccccgagggcttcaagtgggagcgcgtgatgaacttcgaggacggcggcgtggtgaccgtgacccaggactcctccctgcaggacggcgagttcatctacaaggtgaagctgcgcggcaccaacttcccctccgacggccccgtaatgcagaagaagaccatgggctgggaggcctcctccgagcggatgtaccccgaggacggcgccctgaagggcgagatcaagcagaggctgaagctgaaggacggcggccactacgacgctgaggtcaagaccacctacaaggccaagaagcccgtgcagctgcccggcgcctacaacgtcaacatcaagttggacatcacctcccacaacgaggactacaccatcgtggaacagtacgaacgcgccgagggccgccactccaccggcggcatggacgagctgtacaagtaaaatcaacctctggattacaaaatttgtgaaagattgactggtattcttaactatgttgctccttttacgctatgtggatacgctgctttaatgcctttgtatcatgcgttaactaaacttgtttattgcagcttataatggttacaaataaagcaatagcatcacaaatttcacaaataaagcatttttttcactgcattctagttgtggtttgtccaaactcatcaatgtatcttatcatgtctggaattgactcaaatgatgtcaattagtctatcagaagctcatctggtctcccttccgggggacaagacatccctgtttaatatttaaacagcagtgttcccaaactgggttcttatatcccttgctctggtcaaccaggttgcagggtttcctgtcctcacaggaacgaagtccctaaagaaacagtggcagccaggtttagccccggaattgactggattccttttttagggcccattggtatggctttttccccgtatccccccaggtgtctgcaggctcaaagagcagcgagaagcgttcagaggaaagcgatcccgtgccaccttccccgtgcccgggctgtccccgcacgctgccggctcggggatgcggggggagcgccggaccggagcggagccccgggcggctcgctgctgccccctagcgggggagggacgtaattacatccctgggggctttgggggggggctgtccctgatatctataacaagaaaatatatatataataagttatcacgtaagtagaacatgaaataacaatataattatcgtatgagttaaatcttaaaagtcacgtaaaagataatcatgcgtcattttgactcacgcggtcgttatagttcaaaatcagtgacacttaccgcattgacaagcacgcctcacgggagctccaagcggcgactgagatgtcctaaatgcacagcgacggattcgcgctatttagaaagagagagcaatatttcaagaatgcatgcgtcaattttacgcagactatctttctagggttaatctagctgcatcaggatcatatcgtcgggtcttttttccggctcagtcatcgcccaagctggcgctatctgggcatcggggaggaagaagcccgtgccttttcccgcgaggttgaagcggcatggaaagagtttgccgaggatgactgctgctgcattgacgttgagcgaaaacgcacgtttaccatgatgattcgggaaggtgtggccatgcacgcctttaacggtgaactgttcgttcaggccacctgggataccagttcgtcgcggcttttccggacacagttccggatggtcagcccgaagcgcatcagcaacccgaacaataccggcgacagccggaactgccgtgccggtgtgcagattaatgacagcggtgcggcgctgggatattacgtcagcgaggacgggtatcctggctggatgccgcagaaatggacatggataccccgtgagttacccggcgggcgcgcttggcgtaatcatggtcatagctgtttcctgtgtgaaattgttatccgctcacaattccacacaacatacgagccggaagcataaagtgtaaagcctggggtgcctaatgagtgagctaactcacattaattgcgttgcgctcactgcccgctttccagtcgggaaacctgtcgtgccagctgcattaatgaatcggccaacgcgcggggagaggcggtttgcgtattgggcgctcttccgcttcctcgctcactgactcgctgcgctcggtcgttcggctgcggcgagcggtatcagctcactcaaaggcggtaatacggttatccacagaatcaggggataacgcaggaaagaacatgtgagcaaaaggccagcaaaaggccaggaaccgtaaaaaggccgcgttgctggcgtttttccataggctccgcccccctgacgagcatcacaaaaatcgacgctcaagtcagaggtggcgaaacccgacaggactataaagataccaggcgtttccccctggaagctccctcgtgcgctctcctgttccgaccctgccgcttaccggatacctgtccgcctttctcccttcgggaagcgtggcgctttctcatagctcacgctgtaggtatctcagttcggtgtaggtcgttcgctccaagctgggctgtgtgcacgaaccccccgttcagcccgaccgctgcgccttatccggtaactatcgtcttgagtccaacccggtaagacacgacttatcgccactggcagcagccactggtaacaggattagcagagcgaggtatgtaggcggtgctacagagttcttgaagtggtggcctaactacggctacactagaaggacagtatttggtatctgcgctctgctgaagccagttaccttcggaaaaagagttggtagctcttgatccggcaaacaaaccaccgctggtagcggtggtttttttgtttgcaagcagcagattacgcgcagaaaaaaaggatctcaagaagatcctttgatcttttctacggggtctgacgctcagtggaacgaaaactcacgttaagggattttggtcatgagattatcaaaaaggatcttcacctagatccttttaaattaaaaatgaagttttaaatcaatctaaagtatatatgagtaaacttggtctgacagttaccaatgcttaatcagtgaggcacctatctcagcgatctgtctatttcgttcatccatagttgcctgactccccgtcgtgtagataactacgatacgggagggcttaccatctggccccagtgctgcaatgataccgcgagacccacgctcaccggctccagatttatcagcaataaaccagccagccggaagggccgagcgcagaagtggtcctgcaactttatccgcctccatccagtctattaattgttgccgggaagctagagtaagtagttcgccagttaatagtttgcgcaacgttgttgccattgctacaggcatcgtggtgtcacgctcgtcgtttggtatggcttcattcagctccggttcccaacgatcaaggcgagttacatgatcccccatgttgtgcaaaaaagcggttagctccttcggtcctccgatcgttgtcagaagtaagttggccgcagtgttatcactcatggttatggcagcactgcataattctcttactgtcatgccatccgtaagatgcttttctgtgactggtgagtactcaaccaagtcattctgagaatagtgtatgcggcgaccgagttgctcttgcccggcgtcaatacgggataataccgcgccacatagcagaactttaaaagtgctcatcattggaaaacgttcttcggggcgaaaactctcaaggatcttaccgctgttgagatccagttcgatgtaacccactcgtgcacccaactgatcttcagcatcttttactttcaccagcgtttctgggtgagcaaaaacaggaaggcaaaatgccgcaaaaaagggaataagggcgacacggaaatgttgaatactcat

SEQ ID NO: 92 - DNA, 11135 bp, Artificial Sequence
  Description of Artificial Sequence: Synthetic polynucleotide
actcttcctttttcaatattattgaagcatttatcagggttattgtctcatgagcggatacatatttgaatgtatttagaaaaataaacaaataggggttccgcgcacatttccccgaaaagtgccacctaaattgtaagcgttaatattttgttaaaattcgcgttaaatttttgttaaatcagctcattttttaaccaataggccgaaatcggcaaaatcccttataaatcaaaagaatagaccgagatagggttgagtgttgttccagtttggaacaagagtccactattaaagaacgtggactccaacgtcaaagggcgaaaaaccgtctatcagggcgatggcccactacgtgaaccatcaccctaatcaagttttttggggtcgaggtgccgtaaagcactaaatcggaaccctaaagggagcccccgatttagagcttgacggggaaagccggcgaacgtggcgagaaaggaagggaagaaagcgaaaggagcgggcgctagggcgctggcaagtgtagcggtcacgctgcgcgtaaccaccacacccgccgcgcttaatgcgccgctacagggcgcgtcccattcgccattcaggctgcgcaactgttgggaagggcgatcggtgcgggcctcttcgctattacgccagctggcgaaagggggatgtgctgcaaggcgattaagttgggtaacgccagggttttcccagtcacgacgttgtaaaacgacggccagtgagcgcgcctcgttcattcacgtttttgaacccgtggaggacgggcagactcgcggtgcaaatgtgttttacagcgtgatggagcagatgaagatgctcgacacgctgcagaacacgcagctagattaaccctagaaagataatcatattgtgacgtacgttaaagataatcatgtgtaaaattgacgcatgtgttttatcggtctgtatatcgaggtttatttattaatttgaatagatattaagttttattatatttacacttacatactaataataaattcaacaaacaatttatttatgtttatttatttattaaaaaaaacaaaaactcaaaatttcttctataaagtaacaaaacttttatgagggacagcccccccccaaagcccccagggatgtaattacgtccctcccccgctagggggcagcagcgagccgcccggggctccgctccggtccggcgctccccccgcatccccgagccggcagcgtgcggggacagcccgggcacggggaaggtggcacgggatcgctttcctctgaacgcttctcgctgctctttgagcctgcagacacctggggggatacggggaaaaggcctccacggccactagttctaccgggtaggggaggcgcttttcccaaggcagtctggagcatgcgctttagcagccccgctgggcacttggcgctacacaagtggcctctggcctcgcacacattccacatccaccggtaggcgccaaccggctccgttctttggtggccccttcgcgccaccttctactcctcccctagtcaggaagttcccccccgccccgcagctcgcgtcgtgcaggacgtgacaaatggaagtagcacgtctcattagtctcgtgcagatggacagcaccgctgagcaatggaagcgggtaggcctttggggcagcggccaatagcagctttgctccttcgctttctgggctcagaggctgggaaggggtgggtccgggggcgggctcaggggcgggctcaggggcggggcgggcgcccgaaggtcctccggaggcccggcattctgcacgcttcaaaagcgcacgtctgccgcgctgttctcctcttcctcatctccgggcctttcgacctgcaggttaattaaatgggtaagcctatccctaaccctctcctcggtctcgattctacggctagcatggacaagaagtacagcatcggcctggccatcggcaccaactctgtgggctgggccgtgatcaccgacgagtacaaggtgcccagcaagaaattcaaggtgctgggcaacaccgaccggcacagcatcaagaagaacctgatcggcgccctgctgttcgacagcggagaaacagccgaggccacccggctgaagagaaccgccagaagaagatacaccagacggaagaaccggatctgctatctgcaagagatcttcagcaacgagatggccaaggtggacgacagcttcttccacagactggaagagtccttcctggtggaagaggataagaagcacgagcggcaccccatcttcggcaacatcgtggacgaggtggcctaccacgagaagtaccccaccatctaccacctgagaaagaaactggtggacagcaccgacaaggccgacctgcggctgatctatctggccctggcccacatgatcaagttccggggccacttcctgatcgagggcgacctgaaccccgacaacagcgacgtggacaagctgttcatccagctggtgcagacctacaaccagctgttcgaggaaaaccccatcaacgccagcggcgtggacgccaaggccatcctgtctgccagactgagcaagagcagacggctggaaaatctgatcgcccagctgcccggcgagaagaagaatggcctgttcggcaacctgattgccctgagcctgggcctgacccccaacttcaagagcaacttcgacctggccgaggatgccaaactgcagctgagcaaggacacctacgacgacgacctggacaacctgctggcccagatcggcgaccagtacgccgacctgtttctggccgccaagaacctgtccgacgccatcctgctgagcgacatcctgagagtgaacaccgagatcaccaaggcccccctgagcgcctctatgatcaagagatacgacgagcaccaccaggacctgaccctgctgaaagctctcgtgcggcagcagctgcctgagaagtacaaagagattttcttcgaccagagcaagaacggctacgccggctacatcgatggcggagccagccaggaagagttctacaagttcatcaagcccatcctggaaaagatggacggcaccgaggaactgctcgtgaagctgaacagagaggacctgctgcggaagcagcggaccttcgacaacggcagcatcccccaccagatccacctgggagagctgcacgccattctgcggcggcaggaagatttttacccattcctgaaggacaaccgggaaaagatcgagaagatcctgaccttccgcatcccctactacgtgggccctctggccaggggaaacagcagattcgcctggatgaccagaaagagcgaggaaaccatcaccccctggaacttcgaggaagtggtggacaagggcgccagcgcccagagcttcatcgagcggatgaccaacttcgataagaacctgcccaacgagaaggtgctgcccaagcacagcctgctgtacgagtacttcaccgtgtacaacgagctgaccaaagtgaaatacgtgaccgagggaatgagaaagcccgccttcctgagcggcgagcagaaaaaagccatcgtggacctgctgttcaagaccaaccggaaagtgaccgtgaagcagctgaaagaggactacttcaagaaaatcgagtgcttcgactccgtggaaatctccggcgtggaagatcggttcaacgcctccctgggcacataccacgatctgctgaaaattatcaaggacaaggacttcctggacaatgaggaaaacgaggacattctggaagatatcgtgctgaccctgacactgtttgaggacagagagatgatcgaggaacggctgaaaacctatgcccacctgttcgacgacaaagtgatgaagcagctgaagcggcggagatacaccggctggggcaggctgagccggaagctgatcaacggcatccgggacaagcagtccggcaagacaatcctggatttcctgaagtccgacggcttcgccaacagaaacttcatgcagctgatccacgacgacagcctgacctttaaagaggacatccagaaagcccaggtgtccggccagggcgatagcctgcacgagcacattgccaatctggccggcagccccgccattaagaagggcatcctgcagacagtgaaggtggtggacgagctcgtgaaagtgatgggccggcacaagcccgagaacatcgtgatcgaaatggccagagagaaccagaccacccagaagggacagaagaacagccgcgagagaatgaagcggatcgaagagggcatcaaagagctgggcagccagatcctgaaagaacaccccgtggaaaacacccagctgcagaacgagaagctgtacctgtactacctgcagaatgggcgggatatgtacgtggaccaggaactggacatcaaccggctgtccgactacgatgtggacgctatcgtgcctcagagctttctgaaggacgactccatcgataacaaagtgctgactcggagcgacaagaaccggggcaagagcgacaacgtgccctccgaagaggtcgtgaagaagatgaagaactactggcgccagctgctgaatgccaagctgattacccagaggaagttcgacaatctgaccaaggccgagagaggcggcctgagcgaactggataaggccggcttcatcaagagacagctggtggaaacccggcagatcacaaagcacgtggcacagatcctggactcccggatgaacactaagtacgacgagaacgacaaactgatccgggaagtgaaagtgatcaccctgaagtccaagctggtgtccgatttccggaaggatttccagttttacaaagtgcgcgagatcaacaactaccaccacgcccacgacgcctacctgaacgccgtcgtgggaaccgccctgatcaaaaagtaccctaagctggaaagcgagttcgtgtacggcgactacaaggtgtacgacgtgcggaagatgatcgccaagagcgagcaggaaatcggcaaggctaccgccaagtacttcttctacagcaacatcatgaactttttcaagaccgagattaccctggccaacggcgagatccggaagcggcctctgatcgagacaaacggcgaaacaggcgagatcgtgtgggataagggccgggactttgccaccgtgcggaaagtgctgtctatgccccaagtgaatatcgtgaaaaagaccgaggtgcagacaggcggcttcagcaaagagtctatcctgcccaagaggaacagcgacaagctgatcgccagaaagaaggactgggaccctaagaagtacggcggcttcgacagccccaccgtggcctattctgtgctggtggtggccaaagtggaaaagggcaagtccaagaaactgaagagtgtgaaagagctgctggggatcaccatcatggaaagaagcagcttcgagaagaatcccatcgactttctggaagccaagggctacaaagaagtgaaaaaggacctgatcatcaagctgcctaagtactccctgttcgagctggaaaacggccggaagagaatgctggcctctgccggcgaactgcagaagggaaacgaactggccctgccctccaaatatgtgaacttcctgtacctggccagccactatgagaagctgaagggctcccccgaggataatgagcagaaacagctgtttgtggaacagcacaaacactacctggacgagatcatcgagcagatcagcgagttctccaagagagtgatcctggccgacgctaatctggacaaggtgctgagcgcctacaacaagcacagagacaagcctatcagagagcaggccgagaatatcatccacctgtttaccctgaccaatctgggagcccctgccgccttcaagtactttgacaccaccatcgaccggaagaggtacaccagcaccaaagaggtgctggacgccaccctgatccaccagagcatcaccggcctgtacgagacacggatcgacctgtctcagctgggaggcgacctcgagtaagcctcgactgtgccttctagttgccagccatctgttgtttgcccctcccccgtgccttccttgaccctggaaggtgccactcccactgtcctttcctaataaaatgaggaaattgcatcgcattgtctgagtaggtgtcattctattctggggggtggggtggggcaggacagcaagggggaggattgggaagacaatagcaggcatgctggggaacgcgttctagacttaagcaacatgctgctccgccgaaaaagaagagaaaaggttaagcctcgactgtgccttctagttgccagccatctgttgtttgcccctcccccgtgccttccttgaccctggaaggtgccactcccactgtcctttcctaataaaatgaggaaattgcatcgcattgtctgagtaggtgtcattctattctggggggtggggtggggcaggacagcaagggggaggattgggaagacaatagcaggcatgctggggagtgcccgtcagtgggcagagcgcacatcgcccacagtccccgagaagttggggggaggggtcggcaattgaacgggtgcctagagaaggtggcgcggggtaaactgggaaagtgatgtcgtgtactggctccgcctttttcccgagggtgggggagaaccgtatataagtgcagtagtcgccgtgaacgttctttttcgcaacgggtttgccgccagaacacagatggtctctaaaggaggttcgtccgacgacgaagcaacagcggactcgcagcacgccgcacctcctaagaagaaaaggaaggtaggggatccccgggtaccggtcgccaccatggtgagcaagggcgaggagctgttcaccggggtggtgcccatcctggtcgagctggacggcgacgtaaacggccacaagttcagcgtgtccggcgagggcgagggcgatgccacctacggcaagctgaccctgaagttcatctgcaccaccggcaagctgcccgtgccctggcccaccctcgtgaccaccctgtcctggggcgtgcagtgcttcgcccgctaccccgaccacatgaagcagcacgacttcttcaagtccgccatgcccgaaggctacgtccaggagcgcaccatcttcttcaaggacgacggcaactacaagacccgcgccgaggtgaagttcgagggcgacaccctggtgaaccgcatcgagctgaagggcatcgacttcaaggaggacggcaacatcctggggcacaagctggagtacaactactttagcgacaacgtctatatcaccgccgacaagcagaagaacggcatcaaggccaacttcaagatccgccacaacatcgaggacggcggcgtgcagctcgccgaccactaccagcagaacacccccatcggcgacggccccgtgctgctgcccgacaaccactacctgagcacccagtccaagctgagcaaagaccccaacgagaagcgcgatcacatggtcctgctggagttcgtgaccgccgccgggatcactctcggcatggacgagctgtacaagtaaaatcaacctctggattacaaaatttgtgaaagattgactggtattcttaactatgttgctccttttacgctatgtggatacgctgctttaatgcctttgtatcatgttaactaaacttgtttattgcagcttataatggttacaaataaagcaatagcatcacaaatttcacaaataaagcatttttttcactgcattctagttgtggtttgtccaaactcatcaatgtatcttatcatgtctggaattgactcaaatgatgtcaattagtctatcagaagctcatctggtctcccttccgggggacaagacatccctgtttaatatttaaacagcagtgttcccaaactgggttcttatatcccttgctctggtcaaccaggttgcagggtttcctgtcctcacaggaacgaagtccctaaagaaacagtggcagccaggtttagccccggaattgactggattccttttttagggcccattggtatggctttttccccgtatccccccaggtgtctgcaggctcaaagagcagcgagaagcgttcagaggaaagcgatcccgtgccaccttccccgtgcccgggctgtccccgcacgctgccggctcggggatgcggggggagcgccggaccggagcggagccccgggcggctcgctgctgccccctagcgggggagggacgtaattacatccctgggggctttgggggggggctgtccctgatatctataacaagaaaatatatatataataagttatcacgtaagtagaacatgaaataacaatataattatcgtatgagttaaatcttaaaagtcacgtaaaagataatcatgcgtcattttgactcacgcggtcgttatagttcaaaatcagtgacacttaccgcattgacaagcacgcctcacgggagctccaagcggcgactgagatgtcctaaatgcacagcgacggattcgcgctatttagaaagagagagcaatatttcaagaatgcatgcgtcaattttacgcagactatctttctagggttaatctagctgcatcaggatcatatcgtcgggtcttttttccggctcagtcatcgcccaagctggcgctatctgggcatcggggaggaagaagcccgtgccttttcccgcgaggttgaagcggcatggaaagagtttgccgaggatgactgctgctgcattgacgttgagcgaaaacgcacgtttaccatgatgattcgggaaggtgtggccatgcacgcctttaacggtgaactgttcgttcaggccacctgggataccagttcgtcgcggcttttccggacacagttccggatggtcagcccgaagcgcatcagcaacccgaacaataccggcgacagccggaactgccgtgccggtgtgcagattaatgacagcggtgcggcgctgggatattacgtcagcgaggacgggtatcctggctggatgccgcagaaatggacatggataccccgtgagttacccggcgggcgcgcttggcgtaatcatggtcatagctgtttcctgtgtgaaattgttatccgctcacaattccacacaacatacgagccggaagcataaagtgtaaagcctggggtgcctaatgagtgagctaactcacattaattgcgttgcgctcactgcccgctttccagtcgggaaacctgtcgtgccagctgcattaatgaatcggccaacgcgcggggagaggcggtttgcgtattgggcgctcttccgcttcctcgctcactgactcgctgcgctcggtcgttcggctgcggcgagcggtatcagctcactcaaaggcggtaatacggttatccacagaatcaggggataacgcaggaaagaacatgtgagcaaaaggccagcaaaaggccaggaaccgtaaaaaggccgcgttgctggcgtttttccataggctccgcccccctgacgagcatcacaaaaatcgacgctcaagtcagaggtggcgaaacccgacaggactataaagataccaggcgtttccccctggaagctccctcgtgcgctctcctgttccgaccctgccgcttaccggatacctgtccgcctttctcccttcgggaagcgtggcgctttctcatagctcacgctgtaggtatctcagttcggtgtaggtcgttcgctccaagctgggctgtgtgcacgaaccccccgttcagcccgaccgctgcgccttatccggtaactatcgtcttgagtccaacccggtaagacacgacttatcgccactggcagcagccactggtaacaggattagcagagcgaggtatgtaggcggtgctacagagttcttgaagtggtggcctaactacggctacactagaaggacagtatttggtatctgcgctctgctgaagccagttaccttcggaaaaagagttggtagctcttgatccggcaaacaaaccaccgctggtagcggtggtttttttgtttgcaagcagcagattacgcgcagaaaaaaaggatctcaagaagatcctttgatcttttctacggggtctgacgctcagtggaacgaaaactcacgttaagggattttggtcatgagattatcaaaaaggatcttcacctagatccttttaaattaaaaatgaagttttaaatcaatctaaagtatatatgagtaaacttggtctgacagttaccaatgcttaatcagtgaggcacctatctcagcgatctgtctatttcgttcatccatagttgcctgactccccgtcgtgtagataactacgatacgggagggcttaccatctggccccagtgctgcaatgataccgcgagacccacgctcaccggctccagatttatcagcaataaaccagccagccggaagggccgagcgcagaagtggtcctgcaactttatccgcctccatccagtctattaattgttgccgggaagctagagtaagtagttcgccagttaatagtttgcgcaacgttgttgccattgctacaggcatcgtggtgtcacgctcgtcgtttggtatggcttcattcagctccggttcccaacgatcaaggcgagttacatgatcccccatgttgtgcaaaaaagcggttagctccttcggtcctccgatcgttgtcagaagtaagttggccgcagtgttatcactcatggttatggcagcactgcataattctcttactgtcatgccatccgtaagatgcttttctgtgactggtgagtactcaaccaagtcattctgagaatagtgtatgcggcgaccgagttgctcttgcccggcgtcaatacgggataataccgcgccacatagcagaactttaaaagtgctcatcattggaaaacgttcttcggggcgaaaactctcaaggatcttaccgctgttgagatccagttcgatgtaacccactcgtgcacccaactgatcttcagcatcttttactttcaccagcgtttctgggtgagcaaaaacaggaaggcaaaatgccgcaaaaaagggaataagggcgacacggaaatgttgaatactcat

SEQ ID NO: 93 - DNA, 10876 bp, Artificial Sequence
  Description of Artificial Sequence: Synthetic polynucleotide
actcttcctttttcaatattattgaagcatttatcagggttattgtctcatgagcggatacatatttgaatgtatttagaaaaataaacaaataggggttccgcgcacatttccccgaaaagtgccacctaaattgtaagcgttaatattttgttaaaattcgcgttaaatttttgttaaatcagctcattttttaaccaataggccgaaatcggcaaaatcccttataaatcaaaagaatagaccgagatagggttgagtgttgttccagtttggaacaagagtccactattaaagaacgtggactccaacgtcaaagggcgaaaaaccgtctatcagggcgatggcccactacgtgaaccatcaccctaatcaagttttttggggtcgaggtgccgtaaagcactaaatcggaaccctaaagggagcccccgatttagagcttgacggggaaagccggcgaacgtggcgagaaaggaagggaagaaagcgaaaggagcgggcgctagggcgctggcaagtgtagcggtcacgctgcgcgtaaccaccacacccgccgcgcttaatgcgccgctacagggcgcgtcccattcgccattcaggctgcgcaactgttgggaagggcgatcggtgcgggcctcttcgctattacgccagctggcgaaagggggatgtgctgcaaggcgattaagttgggtaacgccagggttttcccagtcacgacgttgtaaaacgacggccagtgagcgcgcctcgttcattcacgtttttgaacccgtggaggacgggcagactcgcggtgcaaatgtgttttacagcgtgatggagcagatgaagatgctcgacacgctgcagaacacgcagctagattaaccctagaaagataatcatattgtgacgtacgttaaagataatcatgtgtaaaattgacgcatgtgttttatcggtctgtatatcgaggtttatttattaatttgaatagatattaagttttattatatttacacttacatactaataataaattcaacaaacaatttatttatgtttatttatttattaaaaaaaacaaaaactcaaaatttcttctataaagtaacaaaacttttatgagggacagcccccccccaaagcccccagggatgtaattacgtccctcccccgctagggggcagcagcgagccgcccggggctccgctccggtccggcgctccccccgcatccccgagccggcagcgtgcggggacagcccgggcacggggaaggtggcacgggatcgctttcctctgaacgcttctcgctgctctttgagcctgcagacacctggggggatacggggaaaaggcctccacggccactagtactttcacttttctctatcactgatagggagtggtaaactcgactttcacttttctctatcactgatagggagtggtaaactcgactttcacttttctctatcactgatagggagtggtaaactcgactttcacttttctctatcactgatagggagtggtaaactcgactttcacttttctctatcactgatagggagtggtaaactcgactttcacttttctctatcactgatagggagtggtaaactcgactttcacttttctctatcactgatagggagtggtaaactcgacctatataagcagagctcgtttagtgaaccgtcagatcgcctggagacgccatccacgctgttttgacctccatagaagacaccgggaccgatccagcctccgcggccccgaattcatggattataaagatgatgatgataaataagcagctggaccaacggacggacgccagcgctaaggatccccgggtaccggtcgccaccatggtgagcaagggcgaggagctgttcaccggggtggtgcccatcctggtcgagctggacggcgacgtaaacggccacaagttcagcgtgtccggcgagggcgagggcgatgccacctacggcaagctgaccctgaagttcatctgcaccaccggcaagctgcccgtgccctggcccaccctcgtgaccaccttcggctacggcctgatgtgcttcgcccgctaccccgaccacatgaagcagcacgacttcttcaagtccgccatgcccgaaggctacgtccaggagcgcaccatcttcttcaaggacgacggcaactacaagacccgcgccgaggtgaagttcgagggcgacaccctggtgaaccgcatcgagctgaagggcatcgacttcaaggaggacggcaacatcctggggcacaagctggagtacaactacaacagccacaacgtctatatcatggccgacaagcagaagaacggcatcaaggtgaacttcaagatccgccacaacatcgaggacggcagcgtgcagctcgccgaccactaccagcagaacacccccatcggcgacggccccgtgctgctgcccgacaaccactacctgagctaccagtccgccctgagcaaagaccccaacgagaagcgcgatcacatggtcctgctggagttcgtgaccgccgccgggatcactctcggcatggacgagctgtacccatacgatgttccagattacgcttaagctagcgcatatgtccacttaagggcgctgacatgcgcatgtgaggatcaattcttacgctgagtacttcgattcctcaaatagcaagacagcccacatggcattccacttatcactggcatcctagatctgatagctttgttctcaaagtctcgagaaattcgaatttaaatcgacgcgtgcctcgactgtgccttctagttgccagccatctgttgtttgcccctcccccgtgccttccttgaccctggaaggtgccactcccactgtcctttcctaataaaatgaggaaattgcatcgcattgtctgagtaggtgtcattctattctggggggtggggtggggcaggacagcaagggggaggattgggaagacaatagcaggcatgctggggaaataaagcaaaaaaaaaaatatcatcgtgttcttcaaaggaaaaccacgtccccgtggttcggggggcctagacgtttttttaacctcgactaaacacatgtaaagcatgtgcaccgaggccccagatcagatcccatacaatggggtaccttctgggcatccttcagccccttgttgaatacgcttgaggagagccatttgactctttccacaactatccaactcacaacgtggcactggggttgtgccgcctttgcaggtgtatcttatacacgtggcttttggccgcagaggcacctgtcgccaggtggggggttccgctgcctgcaaagggtcgctacagacgttgtttgtcttcaagaagcttccagaggaactgcttccttcacgacattcaacagaccttgcattcctttggcgagaggggaaagacccctaggaatgctcgtcaagaagacagggccaggtttccgggccctcacattgccaaaagacggcaatatggtggaaaataacatatagacaaacgcacaccggccttattccaagcggcttcggccagtaacgttaggggggggggagggagaggggcaccgactcggtgccactttttcaagttgataacggactagccttatttaaacttgctatgctgtttccagcatagctcttaaatgttctcgaacatggcattgggaacacggtgtttcgtcctttccacaagatatataaagccaagaaatcgaaatactttcaagttacggtaagcatatgatagtccattttaaaacataattttaaaactgcaaactacccaagaaattattactttctacgtcacgtattttgtactaatatctttgtgtttacagtcaaattaattctaattatctctctaacagccttgtatcgtatatgcaaatatgaaggaatcatgggaaataggccctcttcctgcccgacctcgcggccgcgaaggatctgcgatcgctccggtgcccgtcagtgggcagagcgcacatcgcccacagtccccgagaagttggggggaggggtcggcaattgaacgggtgcctagagaaggtggcgcggggtaaactgggaaagtgatgtcgtgtactggctccgcctttttcccgagggtgggggagaaccgtatataagtgcagtagtcgccgtgaacgttctttttcgcaacgggtttgccgccagaacacagctgaagcttcgaggggctcgcatctctccttcacgcgcccgccgccctacctgaggccgccatccacgccggttgagtcgcgttctgccgcctcccgcctgtggtgcctcctgaactgcgtccgccgtctaggtaagtttaaagctcaggtcgagaccgggcctttgtccggcgctcccttggagcctacctagactcagccggctctccacgctttgcctgaccctgcttgctcaactctacgtctttgtttcgttttctgttctgcgccgttacagatccaagctgtgaccggcgcctacgctagatgaccgagtacaagcccacggtgcgcctcgccacccgcgacgacgtccccagggccgtacgcaccctcgccgccgcgttcgccgactaccccgccacgcgccacaccgtcgatccggaccgccacatcgagcgggtcaccgagctgcaagaactcttcctcacgcgcgtcgggctcgacatcggcaaggtgtgggtcgcggacgacggcgccgcggtggcggtctggaccacgccggagagcgtcgaagcgggggcggtgttcgccgagatcggcccgcgcatggccgagttgagcggttcccggctggccgcgcagcaacagatggaaggcctcctggcgccgcaccggcccaaggagcccgcgtggttcctggccaccgtcggcgtctcgcccgaccaccagggcaagggtctgggcagcgccgtcgtgctccccggagtggaggcggccgagcgcgccggggtgcccgccttcctggagacctccgcgccccgcaacctccccttctacgagcggctcggcttcaccgtcaccgccgacgtcgaggtgcccgaaggaccgcgcacctggtgcatgacccgcaagcccggtgccggaagcggagctactaacttcagcctgctgaagcaggctggagacgtggaggagaaccctggacctatgtctagactggacaagagcaaagtcataaacggcgctctggaattactcaatggagtcggtatcgaaggcctgacgacaaggaaactcgctcaaaagctgggagttgagcagcctaccctgtactggcacgtgaagaacaagcgggccctgctcgatgccctgccaatcgagatgctggacaggcatcatacccacttctgccccctggaaggcgagtcatggcaagactttctgcggaacaacgccaagtcattccgctgtgctctcctctcacatcgcgacggggctaaagtgcatctcggcacccgcccaacagagaaacagtacgaaaccctggaaaatcagctcgcgttcctgtgtcagcaaggcttctccctggagaacgcactgtacgctctgtccgccgtgggccactttacactgggctgcgtattggaggaacaggagcatcaagtagcaaaagaggaaagagagacacctaccaccgattctatgcccccacttctgagacaagcaattgagctgttcgaccggcagggagccgaacctgccttccttttcggcctggaactaatcatatgtggcctggagaaacagctaaagtgcgaaagcggcgggccggccgacgcccttgacgattttgacttagacatgctcccagccgatgcccttgacgactttgaccttgatatgctgcctgctgacgctcttgacgattttgaccttgacatgctccccgggtaactaagtaaccctctccctcccccccccctaacgttactggccgaagccgcttggaataaggccggtgtgcgtttgtctatatgttattttccaccatattgccgtcttttggcaatgtgagggcccggaaacctggccctgtcttcttgacgagcattcctaggggtctttcccctctcgccaaaggaatgcaaggtctgttgaatgtcgtgaaggaagcagttcctctggaagcttcttgaagacaaacaacgtctgtagcgaccctttgcaggcagcggaaccccccacctggcgacaggtgcctctgcggccaaaagccacgtgtataagatacacctgcaaaggcggcacaaccccagtgccacgttgtgagttggatagttgtggaaagagtcaaatggctctcctcaagcgtattcaacaaggggctgaaggatgcccagaaggtaccccattgtatgggatctgatctggggcctcggtgcacatgctttacatgtgtttagtcgaggttaaaaaaacgtctaggccccccgaaccacggggacgtggttttcctttgaaaaacacgatgataatatggccacaaccatggtctctaaaggaggttcgtccgacgacgaagcaacagcggactcgcagcacgccgcacctcctaagaagaaaaggaaggtaggggatccccgggtaccggtcgccaccatggccatcatcaaggagttcatgcgcttcaaggtgcacatggagggctccgtgaacggccacgagttcgagatcgagggcgagggcgagggccgcccctacgagggcacccagaccgccaagctgaaggtgaccaagggtggccccctgcccttcgcctgggacatcctgtcccctcagttcatgtacggctccaaggcctacgtgaagcaccccgccgacatccccgactacttgaagctgtccttccccgagggcttcaagtgggagcgcgtgatgaacttcgaggacggcggcgtggtgaccgtgacccaggactcctccctgcaggacggcgagttcatctacaaggtgaagctgcgcggcaccaacttcccctccgacggccccgtaatgcagaagaagaccatgggctgggaggcctcctccgagcggatgtaccccgaggacggcgccctgaagggcgagatcaagcagaggctgaagctgaaggacggcggccactacgacgctgaggtcaagaccacctacaaggccaagaagcccgtgcagctgcccggcgcctacaacgtcaacatcaagttggacatcacctcccacaacgaggactacaccatcgtggaacagtacgaacgcgccgagggccgccactccaccggcggcatggacgagctgtacaagtaagtcgacaatcaacctctggattacaaaatttgtgaaagattgactggtattcttaactatgttgctccttttacgctatgtggatacgctgctttaatgcctttgtatcatgcgttaactaaacttgtttattgcagcttataatggttacaaataaagcaatagcatcacaaatttcacaaataaagcatttttttcactgcattctagttgtggtttgtccaaactcatcaatgtatcttatcatgtctggaattgactcaaatgatgtcaattagtctatcagaagctcatctggtctcccttccgggggacaagacatccctgtttaatatttaaacagcagtgttcccaaactgggttcttatatcccttgctctggtcaaccaggttgcagggtttcctgtcctcacaggaacgaagtccctaaagaaacagtggcagccaggtttagccccggaattgactggattccttttttagggcccattggtatggctttttccccgtatccccccaggtgtctgcaggctcaaagagcagcgagaagcgttcagaggaaagcgatcccgtgccaccttccccgtgcccgggctgtccccgcacgctgccggctcggggatgcggggggagcgccggaccggagcggagccccgggcggctcgctgctgccccctagcgggggagggacgtaattacatccctgggggctttgggggggggctgtccctgatatctataacaagaaaatatatatataataagttatcacgtaagtagaacatgaaataacaatataattatcgtatgagttaaatcttaaaagtcacgtaaaagataatcatgcgtcattttgactcacgcggtcgttatagttcaaaatcagtgacacttaccgcattgacaagcacgcctcacgggagctccaagcggcgactgagatgtcctaaatgcacagcgacggattcgcgctatttagaaagagagagcaatatttcaagaatgcatgcgtcaattttacgcagactatctttctagggttaatctagctgcatcaggatcatatcgtcgggtcttttttccggctcagtcatcgcccaagctggcgctatctgggcatcggggaggaagaagcccgtgccttttcccgcgaggttgaagcggcatggaaagagtttgccgaggatgactgctgctgcattgacgttgagcgaaaacgcacgtttaccatgatgattcgggaaggtgtggccatgcacgcctttaacggtgaactgttcgttcaggccacctgggataccagttcgtcgcggcttttccggacacagttccggatggtcagcccgaagcgcatcagcaacccgaacaataccggcgacagccggaactgccgtgccggtgtgcagattaatgacagcggtgcggcgctgggatattacgtcagcgaggacgggtatcctggctggatgccgcagaaatggacatggataccccgtgagttacccggcgggcgcgcttggcgtaatcatggtcatagctgtttcctgtgtgaaattgttatccgctcacaattccacacaacatacgagccggaagcataaagtgtaaagcctggggtgcctaatgagtgagctaactcacattaattgcgttgcgctcactgcccgctttccagtcgggaaacctgtcgtgccagctgcattaatgaatcggccaacgcgcggggagaggcggtttgcgtattgggcgctcttccgcttcctcgctcactgactcgctgcgctcggtcgttcggctgcggcgagcggtatcagctcactcaaaggcggtaatacggttatccacagaatcaggggataacgcaggaaagaacatgtgagcaaaaggccagcaaaaggccaggaaccgtaaaaaggccgcgttgctggcgtttttccataggctccgcccccctgacgagcatcacaaaaatcgacgctcaagtcagaggtggcgaaacccgacaggactataaagataccaggcgtttccccctggaagctccctcgtgcgctctcctgttccgaccctgccgcttaccggatacctgtccgcctttctcccttcgggaagcgtggcgctttctcatagctcacgctgtaggtatctcagttcggtgtaggtcgttcgctccaagctgggctgtgtgcacgaaccccccgttcagcccgaccgctgcgccttatccggtaactatcgtcttgagtccaacccggtaagacacgacttatcgccactggcagcagccactggtaacaggattagcagagcgaggtatgtaggcggtgctacagagttcttgaagtggtggcctaactacggctacactagaaggacagtatttggtatctgcgctctgctgaagccagttaccttcggaaaaagagttggtagctcttgatccggcaaacaaaccaccgctggtagcggtggtttttttgtttgcaagcagcagattacgcgcagaaaaaaaggatctcaagaagatcctttgatcttttctacggggtctgacgctcagtggaacgaaaactcacgttaagggattttggtcatgagattatcaaaaaggatcttcacctagatccttttaaattaaaaatgaagttttaaatcaatctaaagtatatatgagtaaacttggtctgacagttaccaatgcttaatcagtgaggcacctatctcagcgatctgtctatttcgttcatccatagttgcctgactccccgtcgtgtagataactacgatacgggagggcttaccatctggccccagtgctgcaatgataccgcgagacccacgctcaccggctccagatttatcagcaataaaccagccagccggaagggccgagcgcagaagtggtcctgcaactttatccgcctccatccagtctattaattgttgccgggaagctagagtaagtagttcgccagttaatagtttgcgcaacgttgttgccattgctacaggcatcgtggtgtcacgctcgtcgtttggtatggcttcattcagctccggttcccaacgatcaaggcgagttacatgatcccccatgttgtgcaaaaaagcggttagctccttcggtcctccgatcgttgtcagaagtaagttggccgcagtgttatcactcatggttatggcagcactgcataattctcttactgtcatgccatccgtaagatgcttttctgtgactggtgagtactcaaccaagtcattctgagaatagtgtatgcggcgaccgagttgctcttgcccggcgtcaatacgggataataccgcgccacatagcagaactttaaaagtgctcatcattggaaaacgttcttcggggcgaaaactctcaaggatcttaccgctgttgagatccagttcgatgtaacccactcgtgcacccaactgatcttcagcatcttttactttcaccagcgtttctgggtgagcaaaaacaggaaggcaaaatgccgcaaaaaagggaataagggcgacacggaaatgttgaatactcat

SEQ ID NO: 94 - DNA, 1218 bp, Homo sapiens
agatggacggccgccgtgttttgggccggttctggagtggctggcggcggggcctgggtgtccgcccagtgcccgaggacgcaggctttggcaccgaagcccggcatcagaggcaaccccgcggctcctgccaacggtcggggcccctcggggaccagcccttcgcggggctgctgccaaaaaacctcagtcgggaggagctggttgatgcgctgcgggcagccgtggtggaccggaaaggacctctagtgacgttgaacaagccacagggtctaccagtgacaggaaaaccaggagagctgacgttgttctcagtgctgccagagctgagccagtccctagggctcagggagcaggagcttcaggttgtccgagcatctgggaaagaaagctctgggcttgtactcctctccagctgtccccagacagctagtcgcctccagaagtacttcacccatgcacggagagcccaaaggcccacagccacctactgtgctgtcactgatgggatcccagctgcttctgaggggaagatccaggctgccctgaaactggaacacattgatggggtcaatctcacagttccagtgaaggccccatcccgaaaggacatcctggaaggtgtcaagaagactctcagtcactttcgtgtggtagccacaggctctggctgtgccctggtccagctgcagccactgacagtgttctccagtcaactacaggtgcacatggtactacagctctgccctgtgcttggggaccacatgtactctgcccgtgtgggcactgtcctgggccagcgatttctgctgccagctgagaacaacaagccccaaagacaggtcctggatgaagccctcctcagacgcctccacctgaccccctcccaggctgcccagctgcccttgcacctccacctacatcggctccttctcccaggcaccagggccagggacacccctgttgagctcctggcaccactgcccccttatttctccaggaccctacagtgcctggggctccgcttacaatagtcctccctctgttcctgaccccctcacacacactggaaagtgagggtgggggctctgcagtcagacaaacctaagatcacatcctggacaggccacttgcttgctgtgtggcattgggcaagtaactttacctctctggacttgtgataataaaagttcctacctcaaaaaaaaaaaaaaaaaa

SEQ ID NO: 95 - DNA, 2806 bp, Homo sapiens
tgaggttagcattacacttctcccagtggagcccatgacttctgatcaggacgctaaggttgtggctgaaccgcagacgcagagagtccaggagggcaaggacagcgctcatctgatgaatggtcctatatctcaaaccacttctcagacaagttccatcccacctttgagtcaggtaccagcaactaaggtttcagagctgaaccctaatgcagaagtgtggggggctcctgtgttacatctggaagcaagcagtgctgctgacggtgtgagtgctgcatgggaggaggtggctggccaccacgcagaccgtggcccgcagggatcggatgccaatggtgatggtgaccagggccatgagaatgccgcattgccagacccgcaggagtcggacccagcagacatgaacgctctcgctctgggtccctcagaatatgactctctgcctgaaaatagcgagacaggaggaaatgagtctcaaccagacagccaggaagacccccgagaagtacttaaaaaaacattggaattctgcttatctagggagaaccttgctagtgacatgtatcttatatcacagatggatagtgaccagtatgtgccaatcacaacggtggctaacctcgaccacatcaagaagctcagcactgatgtggacttgattgtggaagtgctaagatctttacctttagtccaagtggatgaaaagggagaaaaagtaaggccaaatcaaaatcgctgcatagtaatattgcgtgaaatatctgaatctacccccgtggaagaagtagaagcactatttaaaggagataatttaccaaaatttataaactgtgaatttgcatataatgataattggtttattacatttgaaacagaagctgatgcacaacaggcttacaaataccttcgagaagaagtcaaaacttttcaaggaaaaccaattaaggcacggataaaagcaaaggcaatagctataaacacatttttgccaaagaatggatttagacccctggacgtgagcctgtatgcccagcagcgctacgcgacgtcgttctacttccctcccatgtacagcccccagcagcagttccccctgtacagcctgatcactccccagacgtggtcagcaacgcacagctatcttgacccacccttggtaactccatttccaaatactggatttataaatgggtttacgtctccagcgttcaagcctgcggcgtctcctctgacttctctcagacagtatcctcctcgaagcaggaatcctagtaaatctcatctgcggcatgcgattcctagtgcagagaggggacctgggttattagaaagtccttcaatatttaacttcactgcagatcgattaattaatggtgtccggagtccacaaacaaggcaagcaggtcaaactagaacacggattcaaaacccttcagcatatgccaagagagaggctgggcctgggcgtgtggagccaggcagtctcgaatcctctcctggtttagggaggggaaggaagaattcctttggctaccggaagaaaagggaggagaagtttacaagcagccagacacagtctccaacgccaccaaagcctccgtcgccaagcttcgagctggggctgtccagcttccctccattacctggagctgccggcaatttgaagacagaggacttgtttgaaaacaggctatctagcttgataataggaccatccaaagaaaggaccctcagtgcagacgcaagcgtgaacacccttcctgtagtggtctccagagagccctcggtgccggcttcttgtgctgtatcagcaacgtacgagcgatccccctccccagctcatttacccgatgatcccaaggtggcggagaaacagagggaaacccacagtgtggacagacttccttccgccctcactgcgaccgcgtgtaaatcggtgcaggtgaacggagccgccacggaattgcgaaagcccagctacgcagagatttgtcagagaacgagtaaagagcctccttcttccccattgcaaccccaaaaagaacaaaagccaaacactgttggttgtgggaaggaggaaaagaagctggcagagcccgcagagagataccgggagcccccagccctcaagtccacacctggagcccccagagaccagaggcggccggcggggggccggccctcgccctcggccatggggaagcgtctcagccgagagcagagcactccccccaagtctcctcagtgaaaaccgtacgtctgggaggggtcgcagagcgctgtgttaaccacaaacgagacactctcccactcagtgcgagggcgagccgctggttaggagcttgcagtgtctgaggcctgtgggatcctcaagttggttttcttctgtgagttggattctccccctcttgaaaaaaaatcgatttttcaggatttaattaatacaaaccttattttaggttggtgcttaactggaggtgatgcataagtctgatttttttttccaagatagaaaaagcatttatcctaacaaattggtattttttattaagcctccatgtggctctgaatgcaagctatatatagtgagtttttctaaattaagggaactctgcttttttttttttttttttaagtaactggtctgtaagtgcatatctctagaacgtccccgcagatgaatgagggccagtggccttggcagaggcaggtgtggcctcgtagaggcagtgctggccgcgccagggcatcagtgctgatgtgggagctgtgcttccacctaagccgttggtaggggactgtg

SEQ ID NO: 96 - DNA, 1773 bp, Homo sapiens
gacgcagtcagctgcgtgattcccgtgattgcgttacaagctttgtctccttcgacttggagtctttgtccaggacgatgagacactcaaagagaacttactgtcctgattgggatgacaaggattgggattatggaaaatggaggagcagcagcagtcataaaagaaggaagagatcacatagcagtgcccaggagaacaagcgctgcaaatacaatcactctaaaatgtgtgatagccattatttggaaagcaggtctataaatgagaaagattatcatagtcgacgctacattgatgagtacagaaatgactacactcaaggatgtgaacctggacatcgccaaagagaccatgaaagccggtatcagaaccatagtagcaagtcttctggtagaagtggaagaagtagttataaaagcaaacacaggattcaccacagtacttcacatcgtcgttcacatgggaagagtcaccgaaggaaaagaaccaggagtgtagaggatgatgaggagggtcacctgatctgtcagagtggagacgtactaagtgcaagatatgaaattgttgatactttaggtgaaggagcttttggaaaagttgtggagtgcatcgatcataaagcgggaggtagacatgtagcagtaaaaatagttaaaaatgtggatagatactgtgaagctgctcgctcagaaatacaagttctggaacatctgaatacaacagaccccaacagtactttccgctgtgtccagatgttggaatggtttgagcatcatggtcacatttgcattgtttttgaactattgggacttagtacttacgacttcattaaagaaaatggttttctaccatttcgactggatcatatcagaaagatggcatatcagatatgcaagtctgtgaattttttgcacagtaataagttgactcacacagacttaaagcctgaaaacatcttatttgtgcagtctgactacacagaggcgtataatcccaaaataaaacgtgatgaacgcaccttaataaatccagatattaaagttgtagactttggtagtgcaacatatgatgacgaacatcacagtacattggtatctacaagacattatagagcacctgaagttattttagccctagggtggtcccaaccatgtgatgtctggagcataggatgcattcttattgaatactatcttgggtttaccgtatttccaacacacgatagtaaggagcatttagcaatgatggaaaggattcttggacctctaccaaaacatatgatacagaaaaccaggaaacgtaaatattttcaccacgatcgattagactgggatgaacacagttctgccggcagatatgtttcaagacgctgtaaacctctgaaggaatttatgctttctcaagatgttgaacatgagcgtctctttgacctcattcagaaaatgttggagtatgatccagccaaaagaattactctcagagaagccttaaagcatcctttctttgaccttctgaagaaaagtatatagatctgtaattggacagctctctcgaagagatcttacagactgtatcagtctaatttttaaattttaagttattttgtacagctttgtaaattcttaacatttttatattgccatgtttattttgtttgggtaatttggttctttaagtacatagctaaggtaatgaacatctttttcagtaattgtaaagtgatttattcagaataaattttttgtgcttatgaaaaaaaaaaaaaaaaaa

SEQ ID NO: 97 - DNA, 2006 bp, Homo sapiens
ggaaatgagaatcaggatgaaagtcaaacttctgcatcctcttgtgatgagactgagatacagatcagcaaccaggaagaagctgagagacagccacttggccatgtcaccaaaacaaggagaaggtgcaagactgtccgtgtggaccctgactcacagaatcatgaaaagcaggaaagccaggatctcagagctactgcaaaagttccttctccaccagacgagcaccaagaagctgagaatgctgtttcctcaggtaacagagattcaaaggtaccttcagaaggaaagaaatctctctacacagatgagtcatccaaacctggaaaaaataaaagaactgcaatcactactccaaactttaagaagcttcatgaagctcattttaaggaaatggagtccattgatcaatatattgagagaaaaaagaaacattttgaagaacacaattccatgaatgaactgaagcagcccatcaataagggaggggtcaggactccagtacctccaagaggaagactctctgtggcttctactcccatcagccaacgacgctcgcaaggccggtcttgtggccctgcaagtcagagtaccttgggtctgaaggggtcactcaagcgctctgctatctctgcagctaaaacgggtgtcaggttttcagctgctactaaagataatgagcataagcgttcactgaccaagactccagccagaaagtctgcacatgtgaccgtgtctgggggcaccccaaaaggcgaggctgtgcttgggacacacaaattaaagaccatcacggggaattctgctgctgttattaccccattcaagttgacaactgaggcaacgcagactccagtctccaataagaaaccagtgtttgatcttaaagcaagtttgtctcgtcccctcaactatgaaccacacaaaggaaagctaaaaccatgggggcaatctaaagaaaataattatctaaatcaacatgtcaacagaattaacttctacaagaaaacttacaaacaaccccatctccagacaaaggaagagcaacggaagaaacgcgagcaagaacgaaaggagaagaaagcaaaggttttgggaatgcgaaggggcctcattttggctgaagattagtaattttttaacatcttgtaaatattcctgtattctcaacttttttccttttgtaaatttttttttttttgctgtcatccccactttagtcacgagatctttttctgctaactgttcatagtctgtgtagtgtccatgggttcttcatgtgctatgatctctgaaaagacgttatcaccttaaagctcaaattctttgggatggtttttacttaagtccattaacaattcaggtttctaacgagacccatcctaaaattctgtttctagatttttaatgtcaagttcccaagttccccctgctggttctaatattaacagaactgcagtcttctgctagccaatagcatttacctgatggcagctagttatgcaagcttcaggagaatttgaacaataacaagaatagggtaagctgggatagaaaggccacctcttcactctctatagaatatagtaacctttatgaaacggggccatatagtttggttatgacatcaatattttacctaggtgaaattgtttaggcttatgtaccttcgttcaaatatcctcatgtaattgccatctgtcactcactatattcacaaaaataaaactctacaactcattctaacattgcttacttaaaagctacatagccctatcgaaatgcgaggattaatgctttaatgcttttagagacagggtctcactgtgttgcccaggctggtctcaaactccaccaaatgtacttcttattcattttatggaaaagactaggctttgcttagtatcatgtccatgtttccttcacctcagtggagcttctgagttttatactgctcaagatcgtcataaataaaattttttctcattgtcaaaaaaaaaaaaaaa

SEQ ID NO: 98 - DNA, 1272 bp, Homo sapiens
gggggtgagcggcaacatggcgtccaggtctaagcggcgtgccgtggaaagtggggttccgcagccgccggatcccccagtccagcgcgacgaggaagaggaaaaagaagtcgaaaatgaggatgaagacgatgatgacagtgacaaggaaaaggatgaagaggacgaggtcattgacgaggaagtgaatattgaatttgaagcttattccctatcagataatgattatgacggaattaagaaattactgcagcagctttttctaaaggctcctgtgaacactgcagaactaacagatctcttaattcaacagaaccatattgggagtgtgattaagcaaacggatgtttcagaagacagcaatgatgatatggatgaagatgaggtttttggtttcataagccttttaaatttaactgaaagaaagggtacccagtgtgttgaacaaattcaagagttggttctacgcttctgtgagaagaactgtgaaaagagcatggttgaacagctggacaagtttttaaatgacaccaccaagcctgtgggccttctcctaagtgaaagattcattaatgtccctccacagatcgctctgcccatgtaccagcagcttcagaaagaactggcgggggcacacagaaccaataagccatgtgggaagtgctacttttaccttctgattagtaagacatttgtggaagcagaaaaaaacaattccaaaaagaaacctagcaacaaaaagaaagctgcgttaatgtttgcaaatgcagaggaagaatttttctatgagaaggcaattctcaagttcaactactcagtgcaggaggagagcgacacttgtctgggaggcaaatggtcttttgatgacgtaccaatgacgcccttgcgaactgtgatgttaattccaggcgacaagatgaacgaaatcatggataaactgaaagaatatctatctgtctaacccatttccaatggacagtgatgggcttgtttttgtaaaattaccagaaaactcagtggagatttactgaaaaactcagactttattcagattaagttcctctacaaaaagtagggttctgtcccatgtgtctctgacacatttacaaaataccagttttttaaaattttggtcaaattatgagtggttgatttaaaaacttttccaagaagaagaaaagcatggagtcgtaatttaaagaactcaataaaaacttctattttttattttaaaataataccaaaaaaaaaaaaaaaaaaaaaaaaaaaaaa

SEQ ID NO: 99 - DNA, 3906 bp, Homo sapiens
gtgaccccaggccctggtcactccatgctttggagggtgcttttgtcaaagaggcctcctttccctcacccagagctggatttccaagaggctcccatacctagctgccctggcagactcccagggaggaaaaacagcgtggccttggcagctgccccgaggaaggagcccacaggtgacagggagaagccattgccattccctgtcctggcccccttcagcaaccctgaacactctgctccagccaaggtggtgagggcagctgttcctaaacagcgcaaaggcagcaaggttggtgactttggagatgcaatcaattggcccacacctggagagatagcccacaagagtgttcagccacagtcccacaagcctcagcctacccgtaaactgccacccaagaaggacatgaaggaacaggagaaaggagaagggagtgatagtaaggagagtccaaaaaccaaatcagatgaatcaggggaggaaaagaatggagatgaggattgccagcgaggcgggcagaagaagaaaggaaacaaacacaagtgggttccattacaaatagacatgaagcctgaagtgcccagagagaaactggcttcacgccccactcgcccaccggagcctagacacatacctgccaatcgcggagagatcaaagggtctgagtctgccacctacgtgcccgtggccccccccaccccagcctggcaaccagagatcaaaccggagcctgcctggcacgaccaggatgagacatcgagtgtgaagagtgatggggctggtggggcgcgggcttccttccgtggccgtggacgggggcgtggtcgcggccggggacgcggccggggtggcactcgaacccattttgactaccagtttggctaccgaaagtttgatggtgtggaggggcctcgtacgcccaagtacatgaacaacatcacctactactttgacaatgtcagcagcaccgagctttacagtgtggatcaggaactgctcaaagactacatcaagcgccagattgaatactacttcagcgtggacaatttagagcgagacttcttcctgcgaaggaaaatggatgctgatggtttcctacccatcacccttattgcttccttccaccgagtgcaggcccttaccactgacatttcactcatctttgcggccctaaaggacagcaaggtggtggagatcgttgatgagaaagttcgtaggagggaggaaccagaaaagtggcctcttcccccaatagtggattattcacagactgatttctcccagcttctcaactgccctgaatttgttccccgtcagcactaccaaaaggagacagagtcggcacctggctctcctcgtgcagtcaccccagtgccaaccaaaacagaggaggtcagcaacctaaagacactacccaagggcctgtctgccagcctgcctgacctggattctgagaactggattgaagtgaagaagaggcctcggccatccccagcacggcccaagaagtcagaggagtccagattttcccacctgacctccctgcctcagcagctgccttcccagcagctgatgtccaaggatcaggatgagcaagaggaactggattttctgtttgacgaggagatggagcagatggatgggcggaagaacaccttcactgcctggtctgatgaggaatctgactatgagattgatgacagggatgtcaacaagatcctcattgtcacccagacaccacattacatgcgccggcacccagggggggaccgcacaggcaaccacacctcgcgtgccaagatgagcgccgaactggccaaggtcattaatgatggcctcttctactatgagcaggacctgtgggctgaaaagtttgaacctgagtattcccagatcaagcaagaagtcgagaacttcaaaaaggtcaatatgatcagccgggagcagtttgacacactgacccctgagccccctgtggatcccaaccaggaagttcctcctgggccacctcggttccagcaagttcctacggatgccctggccaacaagttgtttggtgctcctgagccctccaccatcgcccgctctctaccaaccactgtcccagagtcaccaaactaccgcaacaccaggacccctcgcactccccggacaccacagctcaaagactcaagccagacatcacggttttacccagtggtgaaagaaggacggacactggatgccaagatgcctcgaaaaagaaagacaagacacagttcaaacccacccttggagagccatgtgggctgggtgatggattcccgtgagcacaggccccgtactgcttccatcagctccagcccctcagaagggacgcctacagttggcagctatggctgtacccctcagtcattgcccaagttccagcatccttcccatgaactgctcaaggaaaatggcttcacacaacacgtctaccataagtatcgtaggcgctgccttaatgagcggaaacgcttgggcattggccagtctcaggagatgaacacactcttccgcttctggtccttcttcctccgagatcacttcaacaaaaagatgtatgaggagttcaagcagctggctctggaggacgccaaagaaggctacagatatggtttggagtgcctttttcgatactacagttatggcctggaaaagaagttccggctggacatattcaaggattttcaggaggaaacggtgaaggactatgaagctggccaactgtatgggctggagaagttctgggccttcttgaaatattccaaagccaaaaatttggacattgaccccaaactgcaagaatacctcggcaaattccgacgtcttgaagacttccgagtagatccccccatgggtgaggagggcaaccacaagcgacactcagtggtagcaggaggtggcggcggtgagggcaggaagcggtgcccctcccagtcttccagcaggcctgctgccatgatcagccaaccccctacaccacccaccggccagcctgtccgggaagatgccaaatggacaagccagcactcgaacacacagactttgggaaagtgaaaagctccttagccctggggcttgaggggggaaaggggtagggtgggtaagagtccatgggggtgcccagtcccaggagaggggacaatgaagggacaggcctggagttactaggacaggcctttgtgctgagtagcaatgtatacaccatttgggctatcagaggtacccctgggcaggagcctctacatccccttccccctcctctctccatgactcttgacatcctagcttcttctaaggggggagggaaaggggggagatttttatatatatatacatatatatatatcaagttttaaattattgatagttcatctggattaccaaaatcactctgcagccctgcccgaggctagtaggctgcaaccctggtccccacccctaacctcctgctccccctcaagccaactatgcagcccacaagaaggccctgcgggcccccccattgcccagcactgtctcatagaaggctctggtggtacctctgggccccaggagcatcagccccttgatcatctggggtttgtcatcaccatattttctccctgctgttcccaccatgcccttctgccatcttctgggagaaggaaaccaaaggatctaaaactggggtttgggggaaggtttcagcctctccccactccccttgccccacaccctttactccccagcccagagagacgctgcttttaccaggaaagactattgaaagatgttttattttatttttctctgacctttccatccttgaaaaaatggggaaaaaagaagaaaaaagacaaaatcgaccataaaagaccaaaaaaaaaaaaaaaaaaa

SEQ ID NO: 100 - DNA, 700 bp, Homo sapiens
gcggcgtgagaagccatgagcagcaaagtctctcgcgacaccctgtacgaggcggtgcgggaagtcctgcacgggaaccagcgcaagcgccgcaagttcctggagacggtggagttgcagatcagcttgaagaactatgatccccagaaggacaagcgcttctcgggcaccgtcaggcttaagtccactccccgccctaagttctctgtgtgtgtcctgggggaccagcagcactgtgacgaggctaaggccgtggatatcccccacatggacatcgaggcgctgaaaaaactcaacaagaataaaaaactggtcaagaagctggccaagaagtatgatgcgtttttggcctcagagtctctgatcaagcagattccacgaatcctcggcccaggtttaaataaggcaggaaagttcccttccctgctcacacacaacgaaaacatggtggccaaagtggatgaggtgaagtccacaatcaagttccaaatgaagaaggtgttatgtctggctgtagctgttggtcacgtgaagatgacagacgatgagcttgtgtataacattcacctggctgtcaacttcttggtgtcattgctcaagaaaaactggcagaatgtccgggccttatatatcaagagcaccatgggcaagccccagcgcctatattaaggcacatttgaataaattctattaccagttc

SEQ ID NO: 101 - DNA, 709 bp, Homo sapiens
gaagccatgagcagcaaagtctctcgcgacaccctgtacgaggcggtgcgggaagtcctgcacgggaaccagcgcaagcgccgcaagttcctggagacggtggagttgcagatcagcttgaagaactatgatccccagaaggacaagcgcttctcgggcaccgtcaggcttaagtccactccccgccctaagttctctgtgtgtgtcctgggggaccagcagcactgtgacgaggctaaggccgtggatatcccccacatggacatcgaggcgctgaaaaaactcaacaagaataaaaaactggtcaagaagctggccaagaagtatgatgcgtttttggcctcagagtctctgatcaagcagattccacgaatcctcggcccaggtttaaataaggcaggaaagttcccttccctgctcacacacaacgaaaacatggtggccaaagtggatgaggtgaagtccacaatcaagttccaaatgaagaaggtgttatgtctggctgtagctgttggtcacgtgaagatgacagacgatgagcttgtgtataacattcacctggctgtcaacttcttggtgtcattgctcaagaaaaactggcagaatgtccgggccttatatatcaagagcaccatgggcaagccccagcgcctatattaaggcacatttgaataaattctattaccagttcaaaaaaaaaaaaaaaaaa

SEQ ID NO: 102 - DNA, 1365 bp, Homo sapiens
ctctcagctctcggcgcacggcccagcttccttcaaaatgtctactgttcacgaaatcctgtgcaagctcagcttggagggtgatcactctacacccccaagtgcatatgggtctgtcaaagcctatactaactttgatgctgagcgggatgctttgaacattgaaacagccatcaagaccaaaggtgtggatgaggtcaccattgtcaacattttgaccaaccgcagcaatgcacagagacaggatattgccttcgcctaccagagaaggaccaaaaaggaacttgcatcagcactgaagtcagccttatctggccacctggagacgttgattttgggcctattgaagacacctgctcagtatgacgcttctgagctaaaagcttccatgaaggggctgggaaccgacgaggactctctcattgagatcatctgctccagaaccaaccaggagctgcaggaaattaacagagtctacaaggaaatgtacaagactgatctggagaaggacattatttcggacacatctggtgacttccgcaagctgatggttgccctggcaaagggtagaagagcagaggatggctctgtcattgattatgaactgattgaccaagatgctcgggatctctatgacgctggagtgaagaggaaaggaactgatgttcccaagtggatcagcatcatgaccgagcggagcgtgccccacctccagaaagtatttgataggtacaagagttacagcccttatgacatgttggaaagcatcaggaaagaggttaaaggagacctggaaaatgctttcctgaacctggttcagtgcattcagaacaagcccctgtattttgctgatcggctgtatgactccatgaagggcaaggggacgcgagataaggtcctgatcagaatcatggtctcccgcagtgaagtggacatgttgaaaattaggtctgaattcaagagaaagtacggcaagtccctgtactattatatccagcaagacactaagggcgactaccagaaagcgctgctgtacctgtgtggtggagatgactgaagcccgacacggcctgagcgtccagaaatggtgctcaccatgcttccagctaacaggtctagaaaaccagcttgcgaataacagtccccgtggccatccctgtgagggtgacgttagcattacccccaacctcattttagttgcctaagcattgcctggccttcctgtctagtctctcctgtaagccaaagaaatgaacattccaaggagttggaagtgaagtctatgatgtgaaacactttgcctcctgtgtactgtgtcataaacagatgaataaactgaatttgtactttaaaaaaaaaaaaaaa

SEQ ID NO: 103 - DNA, 1965 bp, Homo sapiens
ccgcgggggtgccgggactccggccgcagtgtcgccgccatcacggacttcctgtgggacaagcgcacgggcctcgccgccagaacgatgccgcatcctcgaaggtaccactcctcagagcgaggcagccgggggagttaccgtgaacactatcggagccgaaagcataagcgacgaagaagtcgctcctggtcaagtagtagtgaccggacacgacggcgtcggcgagaggacagctaccatgtccgttctcgaagcagttatgatgatcgttcgtccgaccggagggtgtatgaccggcgatactgtggcagctacagacgcaacgattatagccgggatcggggagatgcctactatgacacagactatcggcattcctatgaatatcagcgggagaacagcagttaccgcagccagcgcagcagccggaggaagcacagacggcggaggaggcgcagccggacatttagccgctcatcttcgcacagcagccggagagccaagagtgtagaggacgacgctgagggccacctcatctaccacgtcggggactggctacaagagcgatatgaaatcgttagcaccttaggagaggggaccttcggccgagttgtacaatgtgttgaccatcgcaggggtggggctcgagttgccctgaagatcattaagaatgtggagaagtacaaggaagcagctcgacttgagatcaacgtgctagagaaaatcaatgagaaagaccctgacaacaagaacctctgtgtccagatgtttgactggtttgactaccatggccacatgtgtatctcctttgagcttctgggccttagcaccttcgatttcctcaaagacaacaactacctgccctaccccatccaccaagtgcgccacatggccttccagctgtgccaggctgtcaagttcctccatgataacaagctgacacatacagacctcaagcctgaaaatattctgtttgtgaattcagactatgagctcacctacaacctagagaagaagcgagatgagcgcagtgtgaagagcacagctgtgcgggtggtagactttggcagtgccacctttgaccatgagcaccatagcaccattgtctccactcgccattaccgagcaccagaagtcatccttgagttgggctggtcacagccttgtgatgtgtggagtataggctgcatcatctttgaatactatgtgggattcaccctcttccagacccatgacaacagagagcatctagccatgatggaaaggatcttgggtcctatcccttcccggatgatccgaaagacaagaaagcagaaatatttttaccggggtcgcctggattgggatgagaacacatcagctgggcgctatgttcgtgagaactgcaaaccgctgcggcggtatctgacctcagaggcagaggaacaccaccagctcttcgatctgattgaaagcatgctagagtatgaaccagctaagcggctgaccttgggtgaagcccttcagcatcctttcttcgcccgccttcgggctgagccgcccaacaagttgtgggactccagtcgggatatcagtcggtgacgatcaggccctgggcccccctgcatcttttatagcagtgggtgtccagtccaggacactggtgcttttttatacaagagaacgagccagagttcactccttcctcctggctctctatatacctgtgaatatgtgaaatagtgtaaatatgaaagaacttgtacctatcacttcaacccctgccttgtacataatactattccatccacacagtttccaccctcacctgccccctcatacggagttggatgggggccgagtgaggtaaccaggtggcatctaccccatgttttataaggaattttgtacagtctttgtgaaataaaataacgtgcttcatttgacccccaaaaaaaaaaaaaaaaaaaaaaaaaaaaaaaa

SEQ ID NO: 104 - DNA, 1758 bp, Homo sapiens
gacctacatgcttcctgctgtggctgtctcggaacccgtggtcctccgcttcatgattttctgccgtctcttggcaaaaatggcaaataatgatgctgttctgaagagactggagcagaagggtgcagaggcagatcaaatcattgaatatcttaagcagcaagtttctctacttaaggagaaagcaattttgcaggcaactttgagggaagagaagaaacttcgagttgaaaatgctaaactgaagaaagaaattgaagaactgaaacaagagctaattcaggcagaaattcaaaatggagtgaagcaaataccatttccatctggtactccactgcacgctaattctatggtttctgaaaatgtgatacagtctacagcagtaacaaccgtatcttctggtaccaaagaacagataaaaggaggaacaggagacgaaaagaaagcgaaagagaaaattgaaaagaaaggagagaagaaggagaaaaaacagcaatcaatagctggaagtgccgactctaagccaatagatgtttcccgtctggatcttcgaattggttgcatcataactgctagaaaacaccctgatgcagattctttgtatgtggaagaagtagatgtcggagaaatagccccaaggacagttgtcagtggcctggtgaatcatgttcctcttgaacagatgcaaaatcggatggtgattttactttgtaacctgaaacctgcaaagatgaggggagtattatctcaagcaatggtcatgtgtgctagttcaccagagaaaattgaaatcttggctcctccaaatgggtctgttcctggagacagaattacttttgatgctttcccaggagagcctgacaaggagctgaatcctaagaagaagatttgggagcagatccagcctgatcttcacactaatgatgagtgtgtggctacatacaaaggagttccctttgaggtgaaagggaagggagtatgtagggctcaaaccatgagcaacagtggaatcaaataaaatgcttccactaccaaaagacattagagaaaaccttaaaagtaataaagagaaatatatttgtcacttatacctaaaatatgagtggctcatttttgcattactctcttctagacttgactagtcatttacttggtatatattgttttcattgattggggaaacactagatttttacctcggtttttgatcatttataatggagagaggaagttgcctatgttttgtaataatttattttttagcaggaatattgattagcagcttttttttctttatacacatagataactaactagattaatgtttagtttcttatttgtaggcacaggatgcatgaaatttcaagctctgggattttttgtatattgtgtatctgtatcaaaaatatcctctccttttcaaaaatgacaggttggaaaatgtttgtcagacttattaactggtcatattataataatactgataatgaccaactgctcattctgaaagccaaacataaaagctaggagaagtggcatctgaacatttttgctttgctgccagagtaaccctgactaataatacaataacagcaatttttttaaaaaactgagatttcctactggcttgaagtttttctatttagcaaaataattagtaataagttttgactaggtctaaagaatgaacacattgtaaacagttgccacagtagtttctaataaattgatcataaaagcaaaaaaaaaaaaaaaaaa

SEQ ID NO: 105 - DNA, 2131 bp, Homo sapiens
ggggcagtggcgggcacgcgcagccgagaagatgtctccgacgccgccgctcttcagtttgcccgaagcgcggacgcggtttacgaagtctaccagagaggccttgaacaacaaaaacatcaagccattgttaagtaccttcagccaggtacctggcagtgaaaatgaaaaaaaatgtacccttgaccaagctttcagaggtattctagaagaagaaattataaatcattcatcatgtgaaaacgttttagctattatttctcttgctattgggggagtaactgaaggtatttgtaccgcatctacaccttttgtattgttgggagatgttttggattgtcttcctttggatcagtgtgacacaatattcacttttgtggaaaaaaatgttgctacttggaaatcaaatacattctattctgctgggaaaaattacttactacgtatgtgcaatgatctcctaagaagattgtctaaatcccagaatacagtcttctgtggacggattcagctctttttggccaggcttttccctctgtctgagaaatcaggtcttaacttgcagagtcagtttaatctggaaaatgtcactgttttcaatacaaatgagcaggaaagcaccctgggtcagaagcacactgaagatagagaagaaggaatggatgtagaagaaggcgaaatgggagatgaggaagctccaacaacgtgctctattccaattgattacaacctgtatcgaaaattctggtcacttcaggattacttcaggaaccctgtgcaatgctatgagaagatttcatggaaaacttttctcaagtattctgaagaagttttagctgtttttaagagttataaattagatgatactcaggcctcaagaaaaaagatggaagaattgaaaacaggaggagaacatgtatattttgcaaaatttttaacaagtgaaaagctgatggatttacaactgagtgacagtaactttcgtcgacacatcctgttgcagtatctcattttattccaatatctcaaggggcaggtcaaattcaaaagttcaaactatgttttaactgatgagcaatcactttggattgaagatactacaaaatcagtttatcaactactatctgaaaacccccccgatggagaaagattttcaaagatggtagagcatatattaaacactgaagaaaactggaactcgtggaaaaatgaaggttgcccaagttttgtgaaagaaagaacatcagataccaaacctacgagaataattcggaagagaacagcacccgaggacttcctagggaaaggacccaccaaaaaaattctgatgggaaatgaggagttaacaaggctttggaatctttgccctgataatatggaagcctgtaaatcagagacaagggaacacatgcccactttggaggaattctttgaagaagccattgaacaggcagaccctgaaaatatggtggaaaatgaatataaggctgtgaacaattcaaattatggttggagagccctgagactattagcacggagaagccctcacttcttccagccaaccaaccagcagtttaaaagtttaccagaatatcttgaaaatatggtaataaagctagccaaggaattaccgcctccttctgaagaaataaaaacaggtgaggatgaagatgaggaagataatgatgctctactgaaggaaaatgaaagtcctgatgttcggcgagacaaacctgtaacaggagaacaaatagaggtatttgccaacaagctgggtgaacaatggaagattctggctccctacttggaaatgaaagactcagaaattaggcagattgagtgtgacagtgaagacatgaagatgagagctaagcagctcctggttgcctggcaagatcaagagggagttcatgcaacacctgagaatctgattaatgcactgaataagtctggattaagtgaccttgcagaaagtctaactaatgacaatgagacaaatagttagcttctttttttttctttttattaaaactgtgatagattttgttaccaagcagcatttgataagaggtccactggttttggtaaacaataaacatttttaaaaaaaaaaaaaaaaaaaaaaaaaaaa

SEQ ID NO: 106 - DNA, 2903 bp, Homo sapiens
cgctactgccgctcactcaggacaacgctatggctgagcctgggcacagccaccatctctccgccagagtcaggggaagaactgagaggcgcataccccggctgtggcggctgctgctctgggctgggaccgccttccaggtgacccagggaacgggaccggagcttcacgcctgcaaagagtctgagtaccactatgagtacacggcgtgtgacagcacgggttccaggtggagggtcgccgtgccgcataccccgggcctgtgcaccagcctgcctgaccccgtcaagggcaccgagtgctccttctcctgcaacgccggggagtttctggatatgaaggaccagtcatgtaagccatgcgctgagggccgctactccctcggcacaggcattcggtttgatgagtgggatgagctgccccatggctttgccagcctctcagccaacatggagctggatgacagtgctgctgagtccaccgggaactgtacttcgtccaagtgggttccccggggcgactacatcgcctccaacacggacgaatgcacagccacactgatgtacgccgtcaacctgaagcaatctggcaccgttaacttcgaatactactatccagactccagcatcatctttgagtttttcgttcagaatgaccagtgccagcccaatgcagatgactccaggtggatgaagaccacagagaaaggatgggaattccacagtgtggagctaaatcgaggcaaaaatgtcctctattggagaaccacagccttctcagtatggaccaaagtacccaagcctgtgctgacacaactcatgtacaaatgggccaagccgaaaatctgtagcgaggaccttgagggggcagtgaagctgcctgcctctggtgtgaagacccactgcccaccctgcaacccaggcttcttcaaaaccaacaacagcacctgccagccctgcccatatggttcctactccaatggctcagactgtacccgctgccctgcagggactgaacctgctgtgggatttgaatacaaatggtggaacacgctgcccacaaacatggaaacgaccgttctcagtgggatcaacttcgagtacaagggcatgacaggctgggaggtggctggtgatcacatttacacagctgctggagcctcagacaatgacttcatgattctcactctggttgtgccaggatttagacctccgcagtcggtgatggcagacacagagaataaagaggtggccagaatcacatttgtctttgagaccctctgttctgtgaactgtgagctctacttcatggtgggtgtgaattctaggaccaacactcctgtggagacgtggaaaggttccaaaggcaaacagtcctatacctacatcattgaggagaacactaccacgagcttcacctgggccttccagaggaccacttttcatgaggcaagcaggaagtacaccaatgacgttgccaagatctactccatcaatgtcaccaatgttatgaatggcgtggcctcctactgccgtccctgtgccctagaagcctctgatgtgggctcctcctgcacctcttgtcctgctggttactatattgaccgagattcaggaacctgccactcctgcccccctaacacaattctgaaagcccaccagccttatggtgtccaggcctgtgtgccctgtggtccagggaccaagaacaacaagatccactctctgtgctacaatgattgcaccttctcacgcaacactccaaccaggactttcaactacaacttctccgctttggcaaacaccgtcactcttgctggagggccaagcttcacttccaaagggttgaaatacttccatcactttaccctcagtctctgtggaaaccagggtaggaaaatgtctgtgtgcaccgacaatgtcactgacctccggattcctgagggtgagtcagggttctccaaatctatcacagcctacgtctgccaggcagtcatcatccccccagaggtgacaggctacaaggccggggtttcctcacagcctgtcagccttgctgatcgacttattggggtgacaacagatatgactctggatggaatcacctccccagctgaacttttccacctggagtccttgggaataccggacgtgatcttcttttataggtccaatgatgtgacccagtcctgcagttctgggagatcaaccaccatccgcgtcaggtgcagtccacagaaaactgtccctggaagtttgctgctgccaggaacgtgctcagatgggacctgtgatggctgcaacttccacttcctgtgggagagcgcggctgcttgcccgctctgctcagtggctgactaccatgctatcgtcagcagctgtgtggctgggatccagaagactacttacgtgtggcgagaacccaagctatgctctggtggcatttctctgcctgagcagagagtcaccatctgcaaaaccatagatttctggctgaaagtgggcatctctgcaggcacctgtactgccatcctgctcaccgtcttgacctgctacttttggaaaaagaatcaaaaactagagtacaagtactccaagctggtgatgaatgctactctcaaggactgtgacctgccagcagctgacagctgcgccatcatggaaggcgaggatgtagaggacgacctcatctttaccagcaagaagtcactctttgggaagatcaaatcatttacctccaagaggactcctgatggatttgactcagtgccgctgaagacatcctcaggaggcccagacatggacctgtgagaggcactgcctgcctcacctgcctcctcaccttgcatagcacctttgcaagcctgcggcgatttgggtgccagcatcctgcaacacccactg

SEQ ID NO: 107 - DNA, 1471 bp, Homo sapiens
attaaaaggttccctggttgtgaaaatacatgagataaatcatgaaggccactatcatcctccttctgcttgcacaagtttcctgggctggaccgtttcaacagagaggcttatttgactttatgctagaagatgaggcttctgggataggcccagaagttcctgatgaccgcgacttcgagccctccctaggcccagtgtgccccttccgctgtcaatgccatcttcgagtggtccagtgttctgatttgggtctggacaaagtgccaaaggatcttccccctgacacaactctgctagacctgcaaaacaacaaaataaccgaaatcaaagatggagactttaagaacctgaagaaccttcacgcattgattcttgtcaacaataaaattagcaaagttagtcctggagcatttacacctttggtgaagttggaacgactttatctgtccaagaatcagctgaaggaattgccagaaaaaatgcccaaaactcttcaggagctgcgtgcccatgagaatgagatcaccaaagtgcgaaaagttactttcaatggactgaaccagatgattgtcatagaactgggcaccaatccgctgaagagctcaggaattgaaaatggggctttccagggaatgaagaagctctcctacatccgcattgctgataccaatatcaccagcattcctcaaggtcttcctccttcccttacggaattacatcttgatggcaacaaaatcagcagagttgatgcagctagcctgaaaggactgaataatttggctaagttgggattgagtttcaacagcatctctgctgttgacaatggctctctggccaacacgcctcatctgagggagcttcacttggacaacaacaagcttaccagagtacctggtgggctggcagagcataagtacatccaggttgtctaccttcataacaacaatatctctgtagttggatcaagtgacttctgcccacctggacacaacaccaaaaaggcttcttattcgggtgtgagtcttttcagcaacccggtccagtactgggagatacagccatccaccttcagatgtgtctacgtgcgctctgccattcaactcggaaactataagtaattctcaagaaagccctcatttttataacctggcaaaatcttgttaatgtcattgctaaaaaataaataaaagctagatactggaaacctaactgcaatgtggatgttttacccacatgacttattatgcataaagccaaatttccagtttaagtaattgcctacaataaaaagaaattttgcctgccattttcagaatcatcttttgaagctttctgttgatgttaactgagctactagagatattcttatttcactaaatgtaaaatttggagtaaatatatatgtcaatatttagtaaagcttttcttttttaatttccaaaaaaaaaaaaaaaaaaaaaaaaaaaaa

SEQ ID NO: 108 - DNA, 1479 bp, Homo sapiens
gggggctcagcatttggggacgctctcagctctcggcgcacggcccaggttatcttgtagcatagcaacttcggatttcactctacccggagagtttcccgcttggttgaacacattggcctcaggaagcttccttcaaaatgtctactgttcacgaaatcctgtgcaagctcagcttggagggtgatcactctacacccccaagtgcatatgggtctgtcaaagcctatactaactttgatgctgagcgggatgctttgaacattgaaacagccatcaagaccaaaggtgtggatgaggtcaccattgtcaacattttgaccaaccgcagcaatgcacagagacaggatattgccttcgcctaccagagaaggaccaaaaaggaacttgcatcagcactgaagtcagccttatctggccacctggagacggtgattttgggcctattgaagacacctgctcagtatgacgcttctgagctaaaagcttccatgaaggggctgggaaccgacgaggactctctcattgagatcatctgctccagaaccaaccaggagctgcaggaaattaacagagtctacaaggaaatgtacaagactgatctggagaaggacattatttcggacacatctggtgacttccgcaagctgatggttgccctggcaaagggtagaagagcagaggatggctctgtcattgattatgaactgattgaccaagatgctcgggatctctatgacgctggagtgaagaggaaaggaactgatgttcccaagtggatcagcatcatgaccgagcggagcgtgccccacctccagaaagtatttgataggtacaagagttacagcccttatgacatgttggaaagcatcaggaaagaggttaaaggagacctggaaaatgctttcctgaacctggttcagtgcattcagaacaagcccctgtattttgctgatcggctgtatgactccatgaagggcaaggggacgcgagataaggtcctgatcagaatcatggcctcccgcagtgaagtggacatgttgaaaattaggtctgaattcaagagaaagtacggcaagtccctgtactattatatccagcaagacactaagggcgactaccagaaagcgctgctgtacctgtgtggtggagatgactgaagcccgacacggcctgagcgtccagaaatggtgctcaccatgcttccagctaacaggtctagaaaaccagcttgcgaataacagtccccgtggccatccctgtgagggtgacgttagcattacccccaacctcattttagttgcctaagcattgcctggccttcctgtctagtctctcctgtaagccaaagaaatgaacattccaaggagttggaagtgaagtctatgatgtgaaacactttgcctcctgtgtactgtgtcataaacagatgaataaactgaatttgtccaaaaaaaaaaaaaaaaaaaaaaaaaaaaa

SEQ ID NO: 109 - DNA, 2345 bp, Homo sapiens
gtttgtgaggtgtagtattgagtcctgtttgagctattgttctctttttcctgaaaaatggcactgtcaaagagggagctggatgagctgaaaccatggatagagaagacagtgaagagggtcctgggtttctcagagcctacggtggtcacagcagcattgaactgtgtggggaagggcatggacaagaagaaggcagccgatcatctgaaaccttttcttgatgattctactctccgatttgtggacaaactgtttgaggctgtggaggaaggccgaagctctaggcattccaagtctagcagtgacaggagcagaaaacgagagctaaaggaggtgtttggtgatgactctgagatctctaaagaatcatcaggagtaaagaagcgacgaataccccgttttgaggaggtggaagaagagccagaggtgatccctgggcctccatcagagagccctggcatgctgactaagctccagatcaaacagatgatggaggcagcaacacgacaaatcgaggagaggaaaaaacagctgagcttcattagcccccctacacctcagccaaagactccttcttcctcccaaccagaacgacttcctattggcaacactattcagccctcccaggctgccactttcatgaatgatgccattgagaaggcaaggaaagcagctgaactgcaagctcgaatccaagcccagctggcactgaagccaggactcatcggcaatgccaacatggtgggcctggctaatctccatgccatgggcattgctcccccgaaggtggagttaaaagaccaaacgaaacctacaccactgatcctggatgagcaagggcgcactgtagatgcaacaggcaaggagattgagctgacacaccgcatgcctactctgaaagccaatattcgtgctgtgaagagggaacaattcaagcaacaactaaaggaaaagccatcagaagacatggaatccaataccttttttgacccccgagtctccattgccccttcccagcgccagagacgcacttttaaattccatgacaagggcaaatttgagaagattgctcagcgattacggacaaaggctcaactggagaagctacaggcagagatttcacaagcagctcgaaaaacaggcatccatacttcgactaggcttgccctcattgctcctaagaaggagctaaaggaaggagatattcctgaaattgagtggtgggactcttacataatccccaatggctttgatcttacagaggaaaatcccaagagagaagattattttggaatcacaaatcttgttgaacatccagcccagctcaatcctccagttgacaatgacacaccagttactctgggagtatatcttaccaagaaggaacagaaaaaacttcggagacaaacaaggagggaagcacagaaggaactacaagaaaaagtcaggctgggcctgatgcctcctccagaacccaaagtgagaatttctaatttgatgcgagtattaggaacagaagctgttcaagaccccacgaaggtagaagcccacgtcagagctcagatggcaaaaagacagaaagcgcatgaagaggccaacgctgcccgaaaactcacagcagaacagagaaaggtcaagaaaattaaaaagcttaaagaagacatttcacagggggtacacatatctgtatatagagttcgaaatttgagcaacccagccaagaagttcaagattgaagccaatgctgggcaactgtacctgacaggggtggtggtactgcacaaggatgtcaacgtggtagtagtggaagggggccccaaggcccagaagaaatttaagcgtcttatgctgcatcggataaagtgggatgaacagacatctaacacaaagggagatgatgatgaggagtctgatgaggaagctgtgaagaaaaccaacaaatgtgtactagtctgggagggtacagccaaagaccggagctttggagagatgaagtttaaacagtgtcctacagagaacatggctcgtgagcatttcaaaaagcatggggctgaacactactgggaccttgcgctgagtgaatctgtgttagagtccactgattgagactactgcaagcccttgcctctcctcccttgcctttgtctcttcagtcctctcacttattctatttcccaaccccctcccacttgtttgtgtgatctcagaactgtgccaagcagacactgggacaaagggagaatatcttgctcccctcctgagtcagcctggtgttgccctttattccccttatgtgcatatgattaaagagttatttttaaaaaaaaaaaaaaaaaaaaaaa

SEQ ID NO: 110 - DNA, 794 bp, Homo sapiens
ccagagcagagtcagccagcatgaccgagcgccgcgtccccttctcgctcctgcggggccccagctgggaccccttccgcgactggtacccgcatagccgcctcttcgaccaggccttcgggctgccccggctgccggaggagtggtcgcagtggttaggcggcagcagctggccaggctacgtgcgccccctgccccccgccgccatcgagagccccgcagtggccgcgcccgcctacagccgcgcgctcagccggcaactcagcagcggggtctcggagatccggcacactgcggaccgctggcgcgtgtccctggatgtcaaccacttcgccccggacgagctgacggtcaagaccaaggatggcgtggtggagatcaccggcaagcacgaggagcggcaggacgagcatggctacatctcccggtgcttcacgcggaaatacacgctgccccccggtgtggaccccacccaagtttcctcctccctgtcccctgagggcacactgaccgtggaggcccccatgcccaagctagccacgcagtccaacgagatcaccatcccagtcaccttcgagtcgcgggcccagcttgggggcccagaagctgcaaaatccgatgagactgccgccaagtaaagccttagcccggatgcccacccctgctgccgccactggctgtgcctcccccgccacctgtgtgttcttttgatacatttatcttctgtttttctcaaataaagttcaaagcaacaaaaaaaaaaaaaaaaaaaaaaaaaaaaaaaaaaaaaaaaa

SEQ ID NO: 111 - DNA, 867 bp, Homo sapiens
ccgcctgctaaaaatacccgactggaggagcataaaagcgcagccgagcccagcgccccgcacttttctgagcagacgtccagagcagagtcagccagcatgaccgagcgccgcgtccccttctcgctcctgcggggccccagctgggaccccttccgcgactggtacccgcatagccgcctcttcgaccaggccttcgggctgccccggctgccggaggagtggtcgcagtggttaggcggcagcagctggccaggctacgtgcgccccctgccccccgccgccatcgagagccccgcagtggccgcgcccgcctacagccgcgcgctcagccggcaactcagcagcggggtctcggagatccggcacactgcggaccgctggcgcgtgtccctggatgtcaaccacttcgccccggacgagctgacggtcaagaccaaggatggcgtggtggagatcaccggcaagcacgaggagcggcaggacgagcatggctacatctcccggtgcttcacgcggaaatacacgctgccccccggtgtggaccccacccaagtttcctcctccctgtcccctgagggcacactgaccgtggaggcccccatgcccaagctagccacgcagtccaacgagatcaccatcccagtcaccttcgagtcgcgggcccagcttgggggcccagaagctgcaaaatccgatgagactgccgccaagtaaagccttagcccggatgcccacccctgctgccgccactggctgtgcctcccccgccacctgtgtgttcttttgatacatttatcttctgtttttctcaaataaagttcaaagcaccccccaaaaaaaaaaaaaaaaaaaaaaaaaaaaaaa

SEQ ID NO: 112 - DNA, 651 bp, Artificial Sequence
  Description of Artificial Sequence: Synthetic polynucleotide
ttgcttatcaaggcttttttataatgccaactttgtacaaaaaagttggcatgtcccgctacctgcgtccccccaacacgtctctgttcgtcaggaacgtggccgacgacaccaggtctgaagacttgcggcgtgaatttggtcgttatggtcctatagttgatgtgtatgttccacttgatttctacactcgccgtccaagaggatttgcttatgttcaatttgaggatgttcgtgatgctgaagacgctttacataatttggacagaaagtggatttgtggacggcagattgaaatacagtttgcccagggggatcgaaagacaccaaatcagatgaaagccaaggaagggaggaatgtgtacagttcttcacgctatgatgattatgacagatacagacgttctagaagccgaagttatgaaaggaggagatcaagaagtcggtcttttgattacaactatagaagatcgtatagtcctagaaacagtagaccgactggaagaccacggcgtagcagaagccattccgacaatgatagaccaaactgcagctggaatacccagtacagttctgcttactacacttcaagaaagatctgcccaactttcttgtacaaagttggcattataagaaagcattgcttcccca

SEQ ID NO: 113 - DNA, 2233 bp, Homo sapiens
gaagacatagctgcgggtggctgtgctggtggcgttcaagatgtcgaccaagaatttccgagtcagtgacggggactggatttgccctgacaaaaaatgtggaaatgtaaactttgctagaagaaccagctgtaatcgatgtggtcgggagaaaacaactgaggccaagatgatgaaagctgggggcactgaaataggaaagacacttgcagaaaagagccgaggcctatttagtgctaatgactggcaatgtaaaacttgcagcaatgtgaattgggccagaagatcagagtgtaatatgtgtaatactccaaagtatgctaaattagaagaaagaacaggatatggtggtggttttaatgaaagagaaaatgttgaatatatagaaagagaagaatctgatggtgaatatgatgagtttggacgtaaaaagaaaaaatacagagggaaagcagttggtcctgcatctatattaaaggaagttgaagataaagaatcagagggagaagaagaggatgaggatgaagatctttctaaatataagttagatgaggatgaggatgaagatgacgctgatctctcaaaatataatcttgatgccagtgaagaagaagatagtaataaaaagaaatctaatagacgaagtcgctcaaagtctggatcttcacattcacgatcttcatcacgctcatcctccccctcaagttcaaggtctaggtccaggtcccgttcaagaagttcttccagttcgcagtcaagatctcgttccagttccagagaacgttcgagatctcgtgggtcgaaatcaagatccagctccaggtcccacaggggctcttcttccccacgaaaaagatcttattcaagttcatcatcttctcctgagaggaacagaaagagaagtcgttctagatcttcttcatctggtgatcgcaaaaaaagacgaacaagatcacggtcacccgaaagccaggtgattggtgaaaacactaaacaaccctgagcccagggccaacccctacggaacaccactactttacccagacgccacaggtcatcatctggatcatcccattctggttcccgttcaagttcaaaaaagaaataatgtattaaaatttacatcttaaaaaaatccagtacagtgcatgaagcatatttttaaagaagttggtgtcttacttggtcagaagtgctaaatctgctagtagaggtgcatgcctttcattgcttttcaaaacaatacagctgtgtttatttgtgaagttaaaagtaaatagcattttaagccataatgtcccaaaatagatgttctgtcattcattatttacaaccatttgcttcatttaaaaccatttcagctataacaaagtactttgcttcctaatttaaacccatttttgtcatttccaaatacatcctgtccattggctaagacaggattacctaggcttgcctgaactttgggcatggaagaaagactggaaactagttggaaacaacatacttatggaaaagaaagtcagcctttttatgctgttaacagatgtcagagtgattctcaccaaaaaaagttaaactatgttgtaagcagccaactgtaaatgtctattttgaaattccctatgctaagggtgccttagaatcattgtgtctcttttatccagctttacttttttgctccacatttaatgcaaaagaatcttgtgatgtctacaaggagagaagtgggatatattttcctttctgacacataatttggggcaaaaaagaaagtcttaagagtttatcttttctctgctgatacggttgcttgataaagacatctcaaaatgtttaccaatgttttaagaagctttgtgtgatattcttccaaatgtagttaccaaatataatatggtagaaaaggctaaatcatacttaatgagcaaattgaagtaagcttttaaagtatatttctcttttggtgaaaggccaatggagacattgtgaatttaagtgaacatttgcctcaagatgttaactataaacacactgcatacaattttcttctgaataacaaatgaatgcttattgctgcatgatgtaagcaaaagtcattatttttcctattcatttgaaataagttatggcttaaaatgcttttggagtttatttctcaaaattaaaatctggtcacatgaaaaaaaaaaaaaaaaaaaaaaaaaaaaaaaaaaaaaaaaaaaaaaaaaaa

SEQ ID NO: 114 - DNA, 1086 bp, Homo sapiens
ccatgggttcccgggcgctgcggctctggctggtcgcacccggtggcgggatcaaatggagatttatagcaacatcgccagcttctcagctgtcaccgacagaattgacagaaatgcggaatgatctctttaataaagagaaagccaggcagttatcattaactccccgaactgagaagatagaagttaagcatgttgggaaaactgaccccggtactgtcttcgtgatgaataaaaacatttcaactccctacagttgtgccatgcatttaagcgagtggtattgcaggaagtccattctggctctggtggatggacagccttgggacatgtataagcctttaacaaagtcctgtgaaattaaatttcttactttcaaagattgtgatccaggagaagtgaataaggcatattggcgttcctgtgctatgatgatgggctgtgtgatagagagggcattcaaagatgaatatatggtcaatttggtcagagctccagaagttcctgtaatttctggtgccttctgttatgacgtagttttggatagcaaacttgatgagtggatgccaacaaaagagaacttacgttccttcacaaaggatgctcatgctttaatttataaagatcttccatttgaaactctggaagttgaagcaaaagtggcattggaaatatttcaacacagcaagtacaaagtagatttcatagaagagaaggcatctcagaaccctgagagaatagtcaagctacacagaataggtgacttcattgatgtgagtgagggccctcttattccaagaacaagtatttgtttccagtatgaagtgtcagcagttcacaatcttcaacccacccagccaagtctcatacgaagattccagggtgtgtctttacctgttcacttaagagcacattttacaatatgggataagctattggaaagatctcggaaaatggtaactgaagatcaaagtaaagcaacagaggaatgtacatctacctaataactttctaaaatttaaatatgtataataaaataaatgttttaaatataaaaacaaaaaaaaaaaaaaaaaaaaaaaaaaa

SEQ ID NO: 115 - DNA, 4204 bp, Homo sapiens
ctacctcctcacggctcttcccggcgctctcctggctcccttctgccccagctccgtctcggcggcggcgggcagttgcagtggtgcagaatggctgacctcagtcttgcagatgcattaacagaaccatctccagacattgagggagagataaagcgggacttcattgccacactagaggcagaggcctttgatgatgttgtgggagaaactgttggaaaaacagactatattcctctcctggatgttgatgagaaaaccgggaactcagagtcaaagaagaaaccgtgctcagaaactagccagattgaagatactccatcttctaaaccaacactcctagccaatggtggtcatggagtagaagggagcgatactacagggtctccaactgaattccttgaagagaaaatggcctaccaggaatacccaaatagccagaactggccagaagataccaacttttgtttccaacctgagcaagtggtcgatcctatccagactgatccctttaagatgtaccatgatgatgacctggcagatttggtctttccctccagtgcgacagctgatacttcaatatttgcaggacaaaatgatcccttgaaagacagttacggtatgtctccctgcaacacagctgttgtacctcaggggtggtctgtggaagccttaaactctccacactcagagtcctttgtttccccagaggctgttgcagaacctcctcagccaacggcagttcccttagagctagccaaggagatagaaatggcatcagaagagaggccaccagcacaagcattggaaataatgatgggactgaagactactgacatggcaccatctaaagaaacagagatggccctcgccaaggacatggcactagctacaaaaaccgaggtggcattggctaaagatatggaatcacccaccaaattagatgtgacactggccaaggacatgcagccatccatggaatcagatatggccctagtcaaggacatggaactacccacagaaaaagaagtggccctggttaaggatgtcagatggcccacagaaacagatgtatcttcagccaagaatgtggtactgcccacagaaacagaggtagccccagccaaggatgtgacactgttgaaagaaacagagagggcatctcctataaaaatggacttagccccttccaaggacatgggaccacccaaagaaaacaagaaagaaacagagagggcatctcctataaaaatggacttggctccttccaaggacatgggaccacccaaagaaaacaagatagtcccagccaaggatttggtattactctcagaaatagaggtggcacaggctaatgacattatatcatccacagaaatatcctctgctgagaaggtggctttgtcctcagaaacagaggtagccctggccagggacatgacactgcccccggaaaccaacgtgatcttgaccaaggataaagcactacctttagaagcagaggtggccccagtcaaggacatggctcaactcccagaaacagaaatagccccggccaaggatgtggctccgtccacagtaaaagaagtgggcttgttgaaggacatgtctccactatcagaaacagaaatggctctgggcaaggatgtgactccacctccagaaacagaagtagttctcatcaagaacgtatgtctgcctccagaaatggaggtggccctgactgaggatcaggtcccagccctcaaaacagaagctcccaccaccattggtgggttgaataaaaaacccatgagccttgcttcaggcttagtgccagctgccccacccaaacgccctgccgtcgcctctgccaggccttccatcttaccttcaaaagacgtgaagccaaagcccattgcagatgcaaaggctcctgagaagcgggcctcaccatccaagccagcttctgccccagcctccagatctgggtccaagagcactcagactgttgcaaaaaccacaacagctgctgctgttgcctcaactggcccaagcagtaggagcccctccacgctcctgcccaagaagcccactgccattaagactgagggaaaacctgcagaagtcaagaagatgactgcaaagtctgtaccagctgacttgagtcgcccaaagagcacctccaccagttccatgaagaaaaccaccactctcagtgggacagcccccgctgcaggggtggttcccagccgagtcaaggccacacccatgccctcccggccctccacaactcctttcatagacaagaagcccacctcggccaaacccagctccaccaccccccggctcagccgcctggccaccaatacttctgctcctgatctgaagaatgtccgctccaaggttggctccacggaaaacatcaagcatcagcctggaggaggccgggccaaagtagagaaaaaaacagaggcagctgctacaacccgaaagcctgaatctaatgcagtcactaaaacagccggcccaattgcaagtgcacagaaacaacctgcggggaaagtccagatagtctccaaaaaagtgagctacagccatattcagtccaagtgtggttccaaggacaatattaagcatgtccctggaggtggtaatgttcagattcagaacaagaaagtggacatctctaaggtctcctccaagtgtgggtctaaggctaacatcaagcacaagcctggtggaggagatgtcaagattgaaagtcagaagttgaacttcaaggagaaggcccaggccaaggtgggatccctcgataatgtgggccacctacctgcaggaggtgctgtgaagactgagggcggtggcagcgaggctcctctgtgtccgggtccccctgctggggaggagccggccatctctgaggcagcgcctgaagctggcgcccccacttcagccagtggcctcaatggccaccccaccctgtcagggggtggtgaccaaagggaggcccagaccttggacagccagatccaggagacaagcatctaatgatgacattctggtctcgtcttccgtctcccccgtgttcccctcttgtctcccctgttcccctctcccttccctcctcccatgtcactgcagattgagacctacaggctgacgttccgggcaaatgccagggcccgcaccgaccacggggccgacattgtctcccgccccccacacttccctggcggccccaactcgggctcccgggtccttggccccctttcccgggctgtccactagaccagtgagcgcttgggcgccgtgctgggcagcccgctaggctcgccttccctcctgctttgcgtgcccggggcagcagcagccctgccccacacctcctctcactccccagcctgggcccatctccctgctttggtcttgccccatcactgcgccactgctccgtggaggaggttgggagggggttggggtggttgaggctaagttgggatctaggagaggagaaccagattctatcctcatctttttttggttctttggtccaaacccaaaagaaactgacatgccctcccttctccctggatctacctggagggaagagtggaggtggattccgagtggtgacaggacgctgaccgtggagcttaagccactgcctctccctctggtcccacaaatgggcgcccccccctccccatgcaggtggtgtcgggcccttcttgctgccctgccccaagttgggggtcagtgctgcctgtccccatgcttttcttttctaaccaagaggctggttttggcatctctgtcccattccctgggatctggtggtcagccctaggataaaaagccagggctggagaacaagaaagggccaggagatggaattccttcaggccggcacccacaccctaggacatgtaagccctcatgtccaagggagcctcatgcagatagtaggaaatcaggtctggaaatttaaaaataaaaggcatgagactaaggctatctgcttcccttatgccctgactggagaggggagggaggagaggcaaggcccacagagggcatcccagctaggccttgggatggctgcagtgaggagaaatcccgggaactgtattgacacaaagattcttattgcacttgtattttttgtattaaagtttgcatggtttctaataaaggattcaaacataaaaaaaaaaaaaaaaaa

SEQ ID NO: 116 - DNA, 4204 bp, Homo sapiens; identical to SEQ ID NO: 115

SEQ ID NO: 117 - DNA, 1570 bp, Homo sapiens
gttttgtcagaagcgtccgcgccgcgaggaggaggccctgctggtttctgtgcgggctcttgtcaggatggtgaagctgttcatcggaaacctgccccgggaggctacagagcaggagattcgctcactcttcgagcagtatgggaaggtgctggaatgtgacatcattaagaattacggctttgtgcacatagaagacaagacggcagctgaggatgccatacgcaacctgcaccattacaagcttcatggggtgaacatcaacgtggaagccagcaagaataagagcaaaacctcaacaaagttgcatgtgggcaacatcagtcccacctgcaccaataaggagcttcgagccaagtttgaggagtatggtccggtcatcgaatgtgacatcgtgaaagattatgccttcgtacacatggagcgggcagaggatgcagtggaggccatcaggggccttgataacacagagtttcaaggtgaaccaccctctttgggtagagggctgaacacaaggctgtgtgcagaaaatggttggataagtaaaaggagaggtttggtaaagataacagctgttggctggctggtgatgaagaaataagtgtgggtgatggacttcttatgatgtagaatgcatgggacttaggggctttaccttaggcaaatgtctcctggagaaaagccactcaccttttatttggagcccctacggcttttgtgcttatcagtgcagaaacccttttctttgaaggctttctgagttactgggccttttttattttttatttttttgtagtagagcacagttcagagttcctcactctgaatttattgccctcagcacaggatcagaattctgcattttacgtgaagaacctctcaaaaacatgtcaagcgacacttataggaccagaatccttgttaagctgtcctaccttacacaaactctttaaagggttacagctcttgttgcttttatattatacctgtaccaagggattgtattttgagtttaaggccactctagaattacaaggctgattttaggacttcctggggaggaggcactggggttttaggggcggtaatgactgtcttttcattggtttggggggctggactttataagattttggtgaatagagcacttagatttgtgttatcttggagtcttaaccaaatgaatcttttgtgcctggagggcagcatgggtgatatgtggattgtcacttcatttggaagcatctcaaatccccagcattttgaatgcctacatgttgctcaaaggaaatgcttgttagagcattttggattttgaattttcagatttgggatgctaaaatggtacgtagaacgcaaatattccaaaatctgaggtctgaagcaacagtggcagttcaggggtggtgatcatggtgagttgctatctgaactcttctttcacctcctttgggttcccagtgtcaaaaagagtggtgtccttttttagcttaattaagcaggactgaacaaaaataataaaaaataaaaaaagccttattcaaattaaaaaaaaaaaaaaaaaaaaaaa

SEQ ID NO: 118 - DNA, 1418 bp, Homo sapiens
cccggaatcgacctatggccagcagtcgtccccgccctgcttcaaacatttgggtttcaggagccgggcggaggtgactgccgcgtgtttgcgttgcacgcccaccgcccgaaacacggcggcggcctcagggctgctgcggcctcggcgggggcaggccccggcgcccgcccgcctcccggcctccatcatcccagggtgcaccgcggcgggcgcgggcgcgcggccatgttgcggtagtttgttgttttcttcctgcggaggcgaagggccagctgtggaccgcgaagcgcccggcttcgcctctgcctcctgcagccccctcccttccctgtcctccgtcacccgtacccgggcccggaccaggcacgtcggcccaccagctggcttggtgggggaggctgaaggccgggccccgcgagtgccatggcggccgccctgggagcgagcggaggagcaggcgccggagatgatgactttgaccagtttgataagcctggcgcggaacggtcgtggagaagaagagctgctgatgaggactgggacagtgaacttgaagatgatttacttggagaagatttgctatctggcaaaaagaatcagtcggatttgtcagatgaagagctaaatgatgatcttttgcagagtgataatgaagatgaagaaaatttcagttctcagggtgttacaattagtctgaatgctacatctggcatggttacatcatttgaactctctgacaacactaacgaccaatctggagaacaggaatctgagtatgaacaagaacaaggagaggatgaactggtttatcacaaatctgatggatcagaattgtatactcaagagtacccagaagaaggacagtatgaaggccacgaagctgagttgacagaagaccaaatagaatatgtggaagagccagaggaggagcagctttacactgatgaagtgttagacatcgagatcaatgaacctttagatgaatttacaggaggtatggaaacattggaacttcaaaaggacatcaaagaagaatcagatgaagaagaagaagatgatgaagaatctggacgattacgtttcaaaactgaaaggaaagaaggaacaattattaggctctcagatgtaactagagagagaaggaacattccagaaactttgggtaacttttttgcctgtctcccatcctcctttactctcatttcaacttcctccatagtattgctgtaattaatcaaagtaggcaaagaaggttgactaggtaattgcggctgccgtccggagagtggccggactttggagtgagtgctgtttatggtactgtaaaactcattctttaaaatcattgctgtttatggatttaaaatgcttgaataaaatgtttaagataattaaaaaaaaaaaaaaaaaaaaaa

SEQ ID NO: 119 - DNA, 2652 bp, Homo sapiens
gccgttcggctgcggtacatctcggcactctagctgcagccgggagaggccttgcagccaccgctgtcgcccaagcctccactgccgctgccacctcagcgccggcatctgcatccccagctccagctccgctctgcgccgctgctgccatcgccgctgccacctccgcagcccgggcctccgccgccgccactcaagcatccgtgagtcattttctgcccatctctggtcgcgcggtctccctggtagagtttgtaggcttgcaagatggcagaagcagattttaaaatggtctcggaacctgtcgcccatggggttgccgaagaggagatggctagctcgactagtgattctggggaagaatctgacagcagtagctctagcagcagcactagtgacagcagcagcagcagcagcactagtggcagcagcagcggcagcggcagcagcagcagcagcagcggcagcactagcagccgcagccgcttgtatagaaagaagagggtacctgagccttccagaagggcgcggcgggccccgttgggaacaaatttcgtggataggctgcctcaggcagttagaaatcgtgtgcaagcgcttagaaacattcaagatgaatgtgacaaggtagataccctgttcttaaaagcaattcatgatcttgaaagaaaatatgctgaactcaacaagcctctgtatgataggcggtttcaaatcatcaatgcagaatacgagcctacagaagaagaatgtgaatggaattcagaggatgaggagttcagcagtgatgaggaggtgcaggataacacccctagtgaaatgcctcccttagagggtgaggaagaagaaaaccctaaagaaaacccagaggtgaaagctgaagagaaggaagttcctaaagaaattcctgaggtgaaggatgaagaaaaggaagttgctaaagaaattactgaggtaaaggctgaagaaaaagcagattctaaagactgtatggaggcaacccctgaagtaaaagaagatcctaaagaagtcccccaggtaaaggcagatgataaagaacagcctaaagcaacagaggctaaggcaagggctgcagtaagagagactcataaaagagttcctgaggaaaggcttcaggacagtgtagatcttaaaagagctaggaagggaaagcctaaaagagaagaccctaaaggcattcctgactattggctgattgttttaaagaatgttgacaagctcgggcctatgattcagaagtatgatgagcccattctgaagttcttgtcggatgttagcctgaagttctcaaaacctggccagcctgtaagttacacctttgaatttcattttctacccaacccatacttcagaaatgaggtgctggtgaagacatatataataaaggcaaaaccagatcacaatgatcccttcttttcttggggatgggaaattgaagattgcaaaggctgcaagatagactggagaagaggaaaagatgttactgtgacaactacccagagtcgcacaactgctactggagaaattgaaatccagccaagagtggttcctaatgcatcattcttcaacttctttagtcctcctgagattcctatgattgggaagctggaaccacgagaagatgctatcctggatgaggactttgaaattgggcagattttacatgataatgtcatcctgaaatcaatctattactatactggagaagtcaatggtacctactatcaatttggcaaacattatggaaacaagaaatacagaaaataagtcaatctgaaagatttttcaagaatcttaaaatctcaagaagtgaagcagattcatacagccttgaaaaaagtaaaaccctgacctgtaacctgaacactattattccttatagtcaagtttttgtggtttcttggtagtctatattttaaaaatagtcctaaaaagtgtctaagtgccagtttattctatctaggctgttgtagtataatattcttcaaaatatgtaagctgttgtcaattatctaaagcatgttagtttggtgctacacagtgttgatttttgtgatgtcctttggtcatgtttctgttagactgtagctgtgaaactgtcagaattgttaactgaaacaaatatttgcttgaaaaaaaaagttcatgaagtaccaatgcaagtgttttatttttttcttttttccagcccataagactaagggtttaaatctgcttgcactagctgtgccttcattagtttgctatagaaatccagtacttatagtaaataaaacagtgtattttgaagtttgactgcttgaaaaagattagcatacatctaatgtgaaaagaccacatttgattcaactgagaccttgtgtatgtgacatatagtggcctataaatttaatcataatgatgttattgtttaccactgaggtgttaatataacatagtatttttgaaaaagtttcttcatcttatattgtgtaattgtaaactaaagataccgtgttttctttgtattgtgttctaccttccctttcactgaaaatgatcacttcatttgatactgtttttcatgttcttgtattgcaacctaaaataaataaatattaaagtgtgttatactacaaaaaaaaaaaaaaa

SEQ ID NO: 120 - DNA, 4956 bp, Homo sapiens
aagtggggccgaaggaaaacacggagagggagcccggccgggacaggaagaggctggggaccgcggcgaaggtggtgagtgctcttgggcgccttctcccaacgtccctgccagactcgcctccgggctgattctccagttggtttcctggactccagagtagctgtccggcctggccccggaggtgcaaagtaagaaaattgaagtcaaagaccatgggagatacagcaaaaccttatttcgtgaagcgcactaaagaccgggggactatggatgatgatgacttcagaaggggtcacccccaacaagattatttaataatagatgaccatgctaaaggccatggcagtaaaatggaaaagggccttcaaaaaaagaagataacaccagggaactatgggaatacccccagaaaaggaccatgtgctgtttccagcaatccatatgcatttaaaaacccaatctacagtcaacccgcttggatgaatgacagccacaaagatcagagtaagagatggctgtctgatgaacatactggtaattcagacaactggagagaattcaaacctggacctagaattcctgttataaaccgacaaagaaaagactcctttcaagaaaatgaagatggttataggtggcaagacacaagaggctgcagaactgtaagacgactgtttcataaagacctaacaagcctagaaaccacgtcagaaatggaagcaggaagtcctgaaaacaagaagcagaggtccagacctaggaagccacggaagactagaaatgaggaaaatgagcaggatggagacttggaaggccctgtgatcgatgagtctgtactttcaacgaaggagctgctaggcttacagcaggctgaggagagactgaagagagactgcattgacaggctaaaaaggcgaccacgaaactaccctacagcaaagtacacctgcagactctgtgatgttttaattgaatccattgcatttgcccataagcatatcaaggaaaagaggcacaagaaaaacattaaggagaagcaagaggaagagttgctcactacgttacccccaccaacaccctcccagataaatgcagttggcattgccattgacaaagtggtacaggaatttggcttacacaatgagaacttggaacagaggctagaaattaaacgtatcatggaaaatgtgttccaacacaagttaccagattgttccctaagattatatgggtcatcctgtagcagattgggtttcaaaaattcggatgtaaacattgacatccagtttccagccattattgaaggattctcattaagcaaactagggaatttcaaccttcaagacattgaaaaagatgttgtgatctgggaacatactgacagtgctgcaggggacacaggcataacaaaagaagaggcaccaagagaaacgccgattaaaaggggacaggtgtcattaatattggatgtgaaacaccagccttcagtaccagttgggcagctctgggtggaattgctgcggttctatgctttagaatttaatttggctgatttagtgataagtattcgtgtcaaagaattggtatctcgggaattgaaggattggcccaaaaagcgcattgccattgaagatccctactctgttaaaagaaatgtggcaagaaccctaaatagtcaacctgtgtttgaatatatacttcattgtttaaggacaacatacaagtattttgctcttccacacaaaattacaaaatccagccttctaaagcctctgaatgcaattacatgtatttcagaacattctaaagaagtaataaatcatcatccagatgtacaaacaaaagatgataagctcaaaaactcagttttggcccaaggtcctggtgctaccagttcagctgcaaatacctgtaaggtacagccacttactcttaaagagactgctgaaagttttggaagcccaccaaaagaagaaatgggaaatgaacacatcagtgtccaccctgaaaactcagactgtatccaagcagatgttaactctgatgattacaagggtgataaagtataccatccagaaacaggaaggaaaaacgagaaagagaaagttggaaggaagggcaagcatctgttgactgttgatcagaaacgtggagagcatgttgtctgtggcagcacacgtaataatgagtcagagagcactttggatttagaaggcttccaaaatcccacagctaaagagtgtgagggacttgccactttagataacaaggctgatcttgatggagaaagtacagaaggtactgaggaactagaagactctctaaaccactttacccactcagtacagggccagacatcagaaatgattccctctgatgaagaggaggaggacgacgaagaagaggaggaggaagaagaacctaggctcaccattaaccaaagggaagatgaagatggcatggctaatgaagatgagttagacaacacctacactgggtcaggggatgaggacgccctatctgaagaggatgatgagttaggcgaagctgctaagtatgaagacgtgaaagaatgtggaaaacatgtagaaagagctctcctagtggaacttaataaaataagtctcaaggaagaaaatgtatgtgaagaaaattcacctgtggatcagtctgattttttttatgaattcagtaaacttatcttcaccaaaggcaagggattggactgtgtcagaactattgaagaattagcaagagtcctcagaaaacattcaggtctgagaaacatcttacctattacaacagcaaagatgccaattgtgaagttcttccatttgagaagtggtctggaagtagatatcagtttgtataacacattggcccttcataacacaaggcttttatctgcttattccgccattgatcccagagtgaagtatttgtgctataccatgaaagtatttacaaagatgtgtgatattggtgatgcatctagaggcagcttatcatcgtatgcatatactcttatggtgctatattttctccagcagaggaatccaccagtcattcctgtccttcaagagatatacaaaggtgaaaagaaacctgaaatatttgttgatggctggaatatttatttttttgatcaaatagatgaactgcctacctattggtcagaatgtggaaaaaatacagaatctgttgggcagttatggttgggccttcttcgtttctacacagaggaatttgattttaaagaacatgttattagcatcaggagaaaaagtctgcttacaacttttaagaaacagtggacctcaaaatacattgttattgaagatccctttgatttgaatcataatcttggagctggattatcaaggaaaatgacaaattttataatgaaggcttttatcaatggtagaagagtatttggtattcctgtcaagggattttcaaaggactacccctcaaaaatggaatacttttttgatccagatgtgttaactgaaggagagctggccccaaatgatagatgttgtcgaatttgtggaaaaatcggacacttcatgaaggactgtcctatgaggagaaaagtaagacggcggcgagatcaggaagatgccctgaaccaaagataccctgagaacaaggaaaaaagaagcaaagaggacaaagaaattcacaacaagtacacagaaagggaggtgtcaacaaaagaagataagcccatacagtgcacacctcagaaagccaagccaatgcgggcagctgctgacctggggagggagaagatcctcaggccaccagtagaaaaatggaagagacaggatgacaaagacttaagagaaaaacgttgttttatttgtggaagagaagggcacattaaaaaggaatgcccacagtttaaaggctcttcaggtagcctttccagtaaatacatgactcagggaaaagcctcagcgaagaggacccagcaggaatcatgagggaaggaaaatgcagcactctaaatggccactcaggcgttcctattcactcggaaaattaggttcatttcacaggacacagcagtgtagatcaggcttcaacttaacatttaagggaaatgtcagattttttttttaatttaatgaaattgttaatgaggaaaaatttttaatatagtcttatctaccacacatccccatagatttaaggattttaatagaaagacatgatgtatgtatttaagccacgttaaaagaaaaaatataactatggaccggtattcagtgaatacagtttcatggtttttaattctttcaaagcacattaaaaatggtgtgctgataaaccccaagtaaattaaccctttttccgtataaatccattttttgttttgaagaggggaaattatatttattgttgtttactgaatcctggtgtgaaagcatatcagatatgtatgaactgctactgctgtacttccgatttacggacatcattttattgctatttgtagacgtgataacatgaacatgagtacctatttatgtgggccttcagtggatgggcagtgccactcaggtctctggggtttccctctctaattttaagtaaattgacatataactactatgcttataaaaatgaagtaaggaaaacaagtagtcctgtttgccactaaaaacattttcaaaggaaaaataaaatgaaagtactttttactttttatgatactcagaaattaggatgaagaacttttaaaattgctgaagatcaaagaggttatctctgccagtcacaagtgtggctggtgtcattctgggtctgactggagccctcctggactgtttctttaatttcaaaagccctgcagacatagtacctggtcagaactatgcctcggtttatttatcattttgaaataaaatcagaatttcaacctgtaaagaaaaaaaaaaaaaaaaa

SEQ ID NO: 121 - DNA, 1703 bp, Homo sapiens
caggaggccgacttcgtggaggtgagcgcgggtgccttggccgcctgcagatctacagtgtgaggagtgctggcgatgttctgcacccgaggactgctattttttgccttcctggcaggtctggacatagagttcacgggccttcgttctaacctgtctgggccccagcagatcagtctttttgatttgccatcggagtggtatctaaagacccgtcagagtgttcagcaatttacagtctgtcagattggattgtctgtgttttccgctattgaaggagaggcaaacaagtatatagcccattcgtgtaacttctatctcttccctacaacgtttgggattttggactcagaattctccttccaggcttccagtgttcagtttttgaatcagtatggcttcaactataacaagtttctcaaaaacggaatcccatatatgaatgaagaacaggagaagaaaattagacacgatatcctgactgggaactggagagttcgcagctctccggataaagaccaaatcaaggtggtgattgacgaagtgacgcggtggctggagctggccaaggaaggcgactggatgactcttcctgggatcactggcttccaggcctttgaggtccaactggtgctgaggcaggccctccccaacatctggacggtgctgaaagatgagggggtggtagtgaagaaagtgagtaaacaacatcgttggtatcttcagaacacctcttgtgaccgagagagctgttggaaggaaaatattcttctctcagcaaggggtttttctgtctttttccaaatgctggtgaaagcccagaagcccttagtgggacataatatgatgatggacctgctgcacctccatgagaagttcttcagacccctcccagaaagctacgatcaatttaagcagaatatccacagcctatttcctgttctcattgataccaagagtgtaacaaaggatatctggaaggagatgaatttcccgagggtgtcgaatctttcggaagtctatgaagtcctgaacagtgacttgaatcccaccaagaattctggaccagagattgttcacgcgagcaggtgtgagaaatatgttgagacaaagtgcccccacgaagccgcgtatgatgccttcctctgtgggtcagttcttttgaaagtggcacacttgcttctacagaagatataccacatcgaccccgtgcccgagtcatcctttcctcagtaccttgacgtgctggctccttacgtgaaccaagtgaacctcatccgagcgggggtcccaaagatcaatttttctggtccagattatcccagtatccgacctcccatcctcatcctcagcgtcaaaaggtggcctggggtcagcgagcagcaagtctaccataagtttcagaatctctgcaagtttgatgtcaggcgactcacaagaagccagttcttactcctgaccaataagtttaaggatgcgcggaacatcctgaaggagtaccgggaccacccgaccctgtgcatctccctgtaccgctactggaggcactccccaaacgtcaactgcctgctccaagtctgtggcatagtgactgcctgggcccttctcgcgttcatccttggaagatctggtacctgagtgcagcgaggcctcctgcggccaccctcgggtccccatgctctctgggaggtgtgctgggtgtg

SEQ ID NO: 122 - DNA, 2162 bp, Homo sapiens
gcgccatgcacggctcgcagaaggacaccacgttcaccaagatcttcgtgggcggcctgccgtaccacactaccgacgcctcgctcaggaagtacttcgagggcttcggcgacatcgaggaggccgtggtcatcaccgaccgccagacgggcaagtcccgcggctacggcttcgtgaccatggccgaccgggcggcagctgagagggcttgcaaagacccgaaccccatcatcgacggccgcaaggccaacgtgaacctggcatatctgggcgccaagccgcggagcctccagacgggctttgccattggggtgcagcagctgcaccccaccttgatccagcggacttacgggctgaccccgcactacatctacccaccagccatcgtgcagcccagcgtggtgatcccagccgcccctgtcccgtcgctgtcctcgccctacattgagtacacgccggccagcccggcctacgcccagtacccaccggccacctatgaccagtacccatacgccgcctcgcctgccacggctgccagcttcgtgggctacagctaccctgccgccgtgccccaggccctctcagccgcagcacccgcgggcaccactttcgtgcagtaccaggcgccgcagctgcagcctgacaggatgcagtgaggggcgttcctgccccgaggactgtggcattgtcaccttcacagcagacagagctgccaggccatgatgggctggcgacagcccggctgagcttcagtgaggtgccaccagcacccgtgcctccgaagaccgctcgggcattccgcctgcgccctgggacagcggagagacggcttctctttaatctaggtcccattgtgtcttgagggaggactttaagaatgactgagaactatttaaagacgcaatcccaggttccttgcacaccatggcagcctctccttgcaccttctcctgcctctccacactccaggttccctcaggcttgtgtccccactgctgcatcgtggcggggtgtcacagaccctctgcagcccctggctgccctggactgtgcagagatgcctgactccagggaaacctgaaagcaagaagttaatggactgtttattgtaacttgatcctcccgagctgtgagcgcagtctgaggtgtgaggacacggcctcctgttggagtcccattttctccatcagggcacgtgggcggcttcctcaagcccggaggagctcccaggcgcacaggggccgccggtaacaggggccgccggccaaaggcccctttccagtcatagcactgaagttgcaacttttttcttgtaattgttttgctactaagataatttcagaagttcagtctattttttcagcggatactgccgccaccaagaatccaaaacctatttttgacttggagagacttgcttttgttggttccgcccgtggagacgacgatagtgtttctgtataataaagtgtctgccggctcgcgggccaggatcctctcggtgggatgggcaccacagacaggaggcccctcaggcccgtgcgggccactgtctgctgccgcctgccggggtggcagagtgagttgtctcaggaccccgtcactgcgacgttgacactcctctcccttcccttcctccccaactccccaaacactgtggaaggggagaaggaagtgatccacagcattcaggccacttggggtctagaccatggtggtgccagcctggggggggcagtggccctcagctctgcccgctggagcggttgagtgcagaagggtgcgcctcttccctctacccccgcaccacctgctgtgtgccagcctgagacggttcctgcctgtcttgggggttggtggagggtggaggcagttctgccagccgtggcagggctgctatggggcatccagggctgtgggggtctggaggaggggacatgaggtgagaggtatcctggccgagggcggggggcagcggggggtctccctccggacctacctcagggagctgagcgtgcaggcgctccagggcaggcctgggacagagtcaaggctcagagaataaaggtagctaatctcatcataatatttttattagaatgttctgatgataaaaataaaacttgttttctttaaagaaaaaaaaaaaaaaaaaaaaaaaa

SEQ ID NO: 123 - DNA, 3780 bp, Homo sapiens
agcgagtccgaactctgggcgggaacactggtgggggcggcggaggttgtgcccgcgaagttcctagagctcagcccgttgcggcgggagtagagagaattgggcgcctcgggaggtggcaccgcccctcccgtgggcacaagcaggttgggggcggcgggagccgagcggggacagtcgcgcctggcagcgtgcacgggcgtggacgtgcccgggtgcggccgcgtgtagcgcaagaaggaaactgttgagacgcagcaggtaattgctgccatggaaacacaactgtctaatgggccaacttgcaataacacagccaatggtccaaccaccataaacaacaactgttcgtcaccagttgactctgggaacacagaagacagcaagaccaacttaatagtcaactaccttcctcagaacatgacacaggaggaactaaagagtctctttgggagcattggtgaaatagagtcctgtaagcttgtaagagacaaaataacagggcagagcttgggatatggctttgtgaactacattgaccccaaggatgcagagaaagctatcaacaccctgaatggattgagacttcaaaccaaaacaataaaagtttcctatgctcgcccaagttcagcttctatcagagatgcaaatttatatgtcagcggacttccaaaaacaatgacccagaaggagttggaacagcttttttcacaatatggacgcattattacttctcgtattcttgtcgaccaggtcactggcatatcaaggggtgtagggtttattcgatttgacaagcgaattgaggcagaagaagctatcaaaggcctaaatggccagaaacctcccggtgccacggagccaatcactgtaaagtttgctaataacccaagccaaaaaaccaatcaggccatcctttcccagctgtaccagtctccaaacagaaggtatccaggaccgctagctcagcaggcacagcgttttaggttttctccaatgaccattgacggaatgaccagtttggctggaattaatatccctgggcaccctggaacagggtggtgtatatttgtgtacaacctggctcctgacgcagatgagagtatcctgtggcaaatgtttgggccttttggagctgtcaccaatgtgaaggtcatccgtgactttaacaccaataaatgcaaaggttttggatttgtgactatgacaaactatgatgaggctgccatggcgatagctagcctcaatggataccgtctgggagacagagtactgcaggtctcctttaagacaaacaaaacgcacaaagcctaatgagctcttgtcctcagtccatttatatatgaaaactatacaacaaaggcaagttaagagaaactttatacattagtaaatgtctttgtaagtcagtgttgagatggggataaaatgactacttagcatcctaagaaatatgtgagattttttattgctagtatttgaattaaaacttcttaaatatcttttatgtttgaatatggacaagaggtacagggtttttacctgtcacattgcattctattgccttctttgaagaaggtggaccttttaaagtgtttcagctaagggaagacatttcttttctttttacataactgccttgaacctgtgagtaaatattgaggctttgtgttgtaattcttcagttggttgtgtcttttttttcccccctttttttcctttttctgattagctttgtgtttggtttacatttaaagcattgctgttatgtctgtttaagaaaagtattttgaagtttacatttttatttatgaagtttaaaacagtatttattttgtaattatgatttgggttggggaagggggggctacattataaacgcttattgtaagaatactggagaacttttcgtaaagcagtaccttgccaaagagataagagcctctttgatgtgggtttaaaaaaagcatctatttttataaaaaagaaaatttggagaaactttttactggtcctggaacaaatattttgacttgaatactttgagaaatctcttcatatgacacctagtgagcttttaaaatttaccaggaaatttgcagcggttggaaaatttagaaagatttatggtgtagaaaatacttttgagatctttgtatgaaaggagtagaatcaatggggggaaacactgctggtttcatttttgtaatcaccagtggagcgtctgatcatcctggttattatgtgataggtggctcacattgatttgtgattttgaaacaaataaaaaaaatttacaaaagaatatataagagcaggcaagaaatttaaattaccgagagatgggggaaaaaatctgttcttcctaaagaaatcccttcagatagagctcatggtgtttagtgatgtacttgcagtattgtttgaagaattgttttgtcttaaggaaaaaagacgttgcacatgatttgtactgcagcaaatcagcaaaagtgatctgagttggatatatttgaaggtattttgaaagttacgttcaaggctaacacctgagctttgtgtaatgtaaataagaccttgtgtttatgaacctttcagctaatttaattttttttcccttacatgccaagtgatgttcaggttttgaatgtttttgtatcagttttttcctttgtaaatggcattaacattgttacttgaggtcttgcttaatcacttttgttgtcctgaggacttgaatttacagtgcatcagatttgttgcaaattttgtctgtagatagtctagcttcagctgtttatggtgatgctacattttcgtttataaatatgtttgtggtataaaaaaatgagtataaccataggttttgaacaaatttccttacatttttcatacaaaaatcataaatatctgtatgctattgaaatttaactttgtatgatgcttaaaaaccactatttggggaaataataaaataagtctttaccatgtatgaaagaaattttaaaaaatacaaaatattttctgattagcatctagcttataataaattttcaaaaaagctgaaggcaaaaatgccttcatcaggatgcactgagaactatatagttacgtcctgctttttgtataaactgagatgctcacatgcttccccttagaacaggcaatgtgctatgcataacatagttgtacattatctttgcggttgctttgagttttattttttattatttaaaattgtagttataaaatttttcagtatagtacagtacatatactgtgaggcgcgtgctaaagtgaataagcgagttttcatgctgacccactcaatgctattcagaaatcaattggcttagcactttctcatatccttaggtgcatttagattgccagagttaaccttctgcgtttaaaaaaagaaaaacactaaaaaataaaatacatgtatatacttaaaaaaaaataataaggtttccctcaagggaaaacagcagctacatgcttctttcctatactactgtagcaaaccaaggcattgatgagagggcatgcaaattgtgcttcactttacagtgttttatcagagcacttaataaaatgtaaggctggtatttatttgaagttgtacagtatgacttaattcacatctgttggaatagaaaatatattctgttgagtatttaagaggctgtacatgttttcttttgtgtttggattctttgtactttttcatgttcagtacatcaataaacaaagttgaagggaaaaaaaaaaaaaaaa

SEQ ID NO: 124 - DNA, 2572 bp, Homo sapiens
cagttgcttcagcgtcccggtgtggctgtgccgttggtcctgtgcggtcacttagccaagatgcctgaggaaacccagacccaagaccaaccgatggaggaggaggaggttgagacgttcgcctttcaggcagaaattgcccagttgatgtcattgatcatcaatactttctactcgaacaaagagatctttctgagagagctcatttcaaattcatcagatgcattggacaaaatccggtatgaaagcttgacagatcccagtaaattagactctgggaaagagctgcatattaaccttataccgaacaaacaagatcgaactctcactattgtggatactggaattggaatgaccaaggctgacttgatcaataaccttggtactatcgccaagtctgggaccaaagcgttcatggaagctttgcaggctggtgcagatatctctatgattggccagttcggtgttggtttttattctgcttatttggttgctgagaaagtaactgtgatcaccaaacataacgatgatgagcagtacgcttgggagtcctcagcagggggatcattcacagtgaggacagacacaggtgaacctatgggtcgtggaacaaaagttatcctacacctgaaagaagaccaaactgagtacttggaggaacgaagaataaaggagattgtgaagaaacattctcagtttattggatatcccattactctttttgtggagaaggaacgtgataaagaagtaagcgatgatgaggctgaagaaaaggaagacaaagaagaagaaaaagaaaaagaagagaaagagtcggaagacaaacctgaaattgaagatgttggttctgatgaggaagaagaaaagaaggatggtgacaagaagaagaagaagaagattaaggaaaagtacatcgatcaagaagagctcaacaaaacaaagcccatctggaccagaaatcccgacgatattactaatgaggagtacggagaattctataagagcttgaccaatgactgggaagatcacttggcagtgaagcatttttcagttgaaggacagttggaattcagagcccttctatttgtcccacgacgtgctccttttgatctgtttgaaaacagaaagaaaaagaacaatatcaaattgtatgtacgcagagttttcatcatggataactgtgaggagctaatccctgaatatctgaacttcattagaggggtggtagactcggaggatctccctctaaacatatcccgtgagatgttgcaacaaagcaaaattttgaaagttatcaggaagaatttggtcaaaaaatgcttagaactctttactgaactggcggaagataaagagaactacaagaaattctatgagcagttctctaaaaacataaagcttggaatacacgaagactctcaaaatcggaagaagctttcagagctgttaaggtactacacatctgcctctggtgatgagatggtttctctcaaggactactgcaccagaatgaaggagaaccagaaacatatctattatatcacaggtgagaccaaggaccaggtagctaactcagcctttgtggaacgtcttcggaaacatggcttagaagtgatctatatgattgagcccattgatgagtactgtgtccaacagctgaaggaatttgaggggaagactttagtgtcagtcaccaaagaaggcctggaacttccagaggatgaagaagagaaaaagaagcaggaagagaaaaaaacaaagtttgagaacctctgcaaaatcatgaaagacatattggagaaaaaagttgaaaaggtggttgtgtcaaaccgattggtgacatctccatgctgtattgtcacaagcacatatggctggacagcaaacatggagagaatcatgaaagctcaagccctaagagacaactcaacaatgggttacatggcagcaaagaaacacctggagataaaccctgaccattccattattgagaccttaaggcaaaaggcagaggctgataagaacgacaagtctgtgaaggatctggtcatcttgctttatgaaactgcgctcctgtcttctggcttcagtctggaagatccccagacacatgctaacaggatctacaggatgatcaaacttggtctgggtattgatgaagatgaccctactgctgatgataccagtgctgctgtaactgaagaaatgccaccccttgaaggagatgacgacacatcacgcatggaagaagtagactaatctctggctgagggatgacttacctgttcagtactctacaattcctctgataatatattttcaaggatgtttttctttatttttgttaatattaaaaagtctgtatggcatgacaactactttaaggggaagataagatttctgtctactaagtgatgctgtgataccttaggcactaaagcagagctagtaatgctttttgagtttcatgttggtttattttcacagattggggtaacgtgcactgtaagacgtatgtaacatgatgttaactttgtgtggtctaaagtgtttagctgtcaagccggatgcc

SEQ ID NO: 125 - DNA, 1760 bp, Homo sapiens
gggagtggggcctagctgcagccggagcctgggagacgatgcatcactgtaagcgataccgctcccctgaaccagacccgtacctgagctaccgatggaagaggaggaggtcctacagtcgggaacatgaagggagactgcgatacccgtcccgaagggagcctcccccacgaagatctcggtccagaagccatgaccgcctgccctaccagaggaggtaccgggagcgccgtgacagcgatacataccggtgtgaagagcggagcccatcctttggagaggactactatggaccttcacgttctcgtcatcgtcggcgatcgcgggagagggggccataccggacccgcaagcatgcccaccactgccacaaacgccgcaccaggtcttgtagcagcgcctcctcgagaagccaacagagcagtaagcgcagcagccggagtgtggaagatgacaaggagggtcacctggtgtgccggatcggcgattggctccaagagcgatatgagattgtggggaacctgggtgaaggcacctttggcaaggtggtggagtgcttggaccatgccagagggaagtctcaggttgccctgaagatcatccgcaacgtgggcaagtaccgggaggctgcccggctagaaatcaacgtgctcaaaaaaatcaaggagaaggacaaagaaaacaagttcctgtgtgtcttgatgtctgactggttcaacttccacggtcacatgtgcatcgcctttgagctcctgggcaagaacacctttgagttcctgaaggagaataacttccagccttaccccctaccacatgtccggcacatggcctaccagctctgccacgcccttagatttctgcatgagaatcagctgacccatacagacttgaaaccagagaacatcctgtttgtgaattctgagtttgaaaccctctacaatgagcacaagagctgtgaggagaagtcagtgaagaacaccagcatccgagtggctgactttggcagtgccacatttgaccatgagcaccacaccaccattgtggccacccgtcactatcgcccgcctgaggtgatccttgagctgggctgggcacagccctgtgacgtctggagcattggctgcattctctttgagtactaccggggcttcacactcttccagacccacgaaaaccgagagcacctggtgatgatggagaagatcctagggcccatcccatcacacatgatccaccgtaccaggaagcagaaatatttctacaaagggggcctagtttgggatgagaacagctctgacggccggtatgtgaaggagaactgcaaacctctgaagagttacatgctccaagactccctggagcacgtgcagctgtttgacctgatgaggaggatgttagaatttgaccctgcccagcgcatcacactggccgaggccctgctgcaccccttctttgctggcttgacccctgaggagcggtccttccacaccagccgcaacccaagcagatgacaggcacaggccaccgcatgaggagatggagggcgggactgggccgcccagccccttgactccagcctcgaccgccaggccccaggccagagccacccaatgaacagtgcaatgtgaaggaaggcaggagcctgcaggggagcagacttggtgcccagctgccagaaagcacagatttgacccaagctatttatatgttataaagttataataaagtgtttcttactgtttgtaaaaaaaaaaaaaaaa

SEQ ID NO: 126 - DNA, 3729 bp, Homo sapiens
ggcccaagccgccattgttccgccgagggaggacagcggggcctggcgctggcgccgagacgccgcttagcggccgccactggagacactccctcccgcctcccgggtctcctggcggcggcggagtgaggctgacagcggggaacctgggagacccctccgccctccccgcggtggcagcggccgatccccggctccggcgcgagggacggccgcgatgcgctcggcctgaggttacccggcccggcccttcctcgcttccctcgactattccactgcgtctccgcgccccggcgtcatcctgcgagtccctctgacgggagggaagatggctgcacggagctggcaggacgagctggcccagcaggccgaggagggctcggcccggctgcgggaaatgctctcggtcggcctaggctttctgcgcaccgagctgggcctcgacctggggctggagccgaaacggtaccccggctgggtgatcctggtgggcactggcgcgctcgggctgctgctgctgtttctgctgggctacggctgggccgcggcttgcgccggctcccgcaaaaagcggaggagcccgccccgcaagcgggaggaggcggcggccgtgccggccgcggcccccgacgacctggccttgctgaagaatctccggagcgaggaacagaagaagaagaaccggaagaaactgtccgagaagcccaaaccaaatgggcggactgttgaagtggctgagggtgaagctgttcgaacacctcaaagtgtaacagcaaagcagccaccagagattgacaagaaaaatgaaaagtcaaagaaaaataagaagaaatcaaagtcagatgctaaagcagtgcaaaacagttcacgccatgatggaaaggaagttgatgaaggagcctgggaaactaaaattagtcacagagagaaacgacagcagcgtaaacgtgataaggtgctgactgattctggttcattggattcaactatccctgggatagaaaataccatcacagttaccaccgagcaacttacaaccgcatcatttcctgttggttccaagaagaataaaggtgattctcatctaaatgttcaagttagcaactttaaatctggaaaaggagattctacacttcaggtttcttcaggattgaatgaaaacctcactgtcaatggaggaggctggaatgaaaagtctgtaaaactctcctcacagatcagtgcaggtgaggagaagtggaactccgtttcacctgcttctgcaggaaagaggaaagctgagccatctgcctggagtcaagacactggagatgctaatacaaatggaaaagactggggaaggagttggagtgaccgttcaatattttctggcattgggtctactgctgagccagtttctcagtctaccacttctgattatcagtgggatgttagccgtaatcaaccctatatcgatgatgaatggtctgggttaaatggtctgtcttctgctgatcccaactctgattggaatgcaccagcagaagagtggggcaattgggtagacgaagaaagagcttcacttctaaagtcccaggaaccaattcctgatgatcaaaaggtctcagatgatgataaagaaaagggagagggagctcttccaactgggaaatccaaaaagaaaaaaaagaaaaagaagaagcaaggtgaagataactctactgcacaggacacagaagaattagaaaaagagattagagaagaccttccagtgaatacctctaaaacccgtccaaaacaggaaaaagctttttccttgaagaccataagcactagtgatccagccgaagtactcgtcaaaaatagccagcctatcaagactcttccacctgctacttctaccgagccatctgtaatcttatcaaaaagtgattctgacaagagctcttcccaagtgccgccaatactacaagagacagataaatccaagtcaaataccaagcaaaatagtgtgcctccttcacagaccaagtctgaaactagctgggaatctcccaaacaaataaaaaagaagaaaaaagccagacgagaaacgtgaaattttttttcctgaattggacatgtgtttgcaaacacttgtcttgaagattatgctgtttatgcaataatttgtgaacatgtacagagttttatataaatttaaaccaatttttaaaacaaaactgcggacaccaccataaaaatggaatcaaaagaaagttaatttatgaaattaagaggtcagcagaatatactcagtgatggaagacacttgggaaagtctttttaatagaacaagaacgatcttaatttaagaatattatcctggtttaacaacagtgccctgtttacaacagattgtgccctatctcatctgcagccgaggaataaaggattctgattagaaagagggttgcctacagattagtaagcaattccttggatcttatgcacagaacttgtaccatttgaatctgttttatgcttaaatcaaagtgctttgatcaaatgcataacctgccatatctttacatatttgttggtagcaatttgtattaaagaaatcacaagtgcaaataaaaagtcatttatcatttgtttaactaaactgtcatggtttagtttacaatttttaaaaagttcttaaaatactgaaaatgcagttgacacttgtgtatggcttatgaagttatttttgatagtcttacattacttgaattgttcaaagtacagtatattttaaattaagaaaagtgaactatatgtatttgttttatacatttaaggcttagactcataaataatgctattgtttatgatttgaaaactttcaggcaaaatccaatttacatttttcccttccctagcaattacttttttccagcttcaactcttcttagttactaatactttgttgactttaaaaatgaaatcattcacaaacttttggtatatgatggagaatgaaaaactagagtcagacagctttaattgacattgtcaacacctccagttatcaggaatacatttttttactgccttaacctgtagtgcgtagaatatgcatcaatttcttgaaggagattcatgtttttataagaattttcatgtaattattgcaattgtggtcaaataaggaacgtttcctgcttgaaattatattgatttaaatgatgtgtgagatgtttcaccattttcaggcactgtgtaattctattgtaataaactggcaggtatctttgtaactataaatagtgcatgctcagccatgtacactgtaaatagcctttaccaaacgtgtttgacaaggaccataattaacatcacttagtgaattgtgataaagaaaaaaaagccatgatttattcgatgtgattggcttgtttttatgtggcgccaagaacgaacctgtttaacagctgtaaccaatggtactgatctatccatccaatgttgtcattatatttgactgtggttcaacagtattgcgttgtcagactaggaaagctaaacgaacaaaatggttttagttttgctgaagactggccttattaatggacagctttcctaacaagagattattaacttttatcaggtgttaacatctgtttcaggaacatggcagtatgtttacatgtcagaagttttgtttaattctatggtatttctaaattgacttgtttaaataaattcagcaaaaaaaaaaaaaaa

SEQ ID NO: 127 - DNA, 792 bp, Homo sapiens
atggcccggggccccaagaagcatctgaagcgggtggcagctccaaagcattggatgctggataaattgaccggtgtgtttgctcctcgtccatccaccggtccccacaagttgagagagtgtctccccctcatcattttcctgaggaacagacttaagtatgccctgacaggagatgaagtaaagaagatttgcatgcagcggttcattaaaatcgatggcaaggtccgaactgatataacctaccctgctggattcatggatgtcatcagcattgacaagacgggagagaatttccgtctgatctatgacaccaagggtcgctttgctgtacatcgtattacacctgaggaggccaagtacaagttgtgcaaagtgagaaagatctttgtgggcacaaaaggaatccctcatctggtgactcatgatgcccgcaccatccgctaccccgatcccctcatcaaggtgaatgataccattcagattgatttagagactggcaagattactgatttcatcaagttcgacactggtaacctgtgtatggtgactggaggtgctaacctaggaagaattggtgtgatcaccaacagagagaggcaccctggatcttttgacgtggttcacgtgaaagatgccaatggcaacagctttgccactcgactttccaacatttttgttattggcaagggcaacaaaccatggatttctcttccccgaggaaagggtatccgcctcaccattgctgaagagagagacaaaagactggctgccaaacagagcagtggctaa

SEQ ID NO: 128 - DNA, 894 bp, Homo sapiens
tttcgcctccgcctgtggatgctgcgcctctccgaacgcaacatgaaggtgctccttgccgccgccctcatcgcggggtccgtcttcttcctgctgctgccgggaccttctgcggccgatgagaagaagaaggggcccaaagtcaccgtcaaggtgtattttgacctacgaattggagatgaagatgtaggccgggtgatctttggtctcttcggaaagactgttccaaaaacagtggataattttgtggccttagctacaggagagaaaggatttggctacaaaaacagcaaattccatcgtgtaatcaaggacttcatgatccagggcggagacttcaccaggggagatggcacaggaggaaagagcatctacggtgagcgcttccccgatgagaacttcaaactgaagcactacgggcctggctgggtgagcatggccaacgcaggcaaagacaccaacggctcccagttcttcatcacgacagtcaagacagcctggctagatggcaagcatgtggtgtttggcaaagttctagagggcatggaggtggtgcggaaggtggagagcaccaagacagacagccgggataaacccctgaaggatgtgatcatcgcagactgcggcaagatcgaggtggagaagccctttgccatcgccaaggagtagggcacagggacatctttctttgagtgaccgtctgtgcaggccctgtagtccgccacagggctctgagctgcactggccccggtgctggcatctggtggagcggacccactcccctcacattccacaggcccatggactcacttttgtaacaaactcctaccaacactgaccaataaaaaaaaatgtgggtttttttttttttaatataaaaaaaaaaaaaaaaaa

SEQ ID NO: 129 - DNA, 3058 bp, Homo sapiens
ggcagaagaggaagatttctgaagagtgcagctgcctgaaccgagccctgccgaacagctgagaattgcactgcaaccatgagtgagaacaataagaattccttggagagcagcctacggcaactaaaatgccatttcacctggaacttgatggagggagaaaactccttggatgattttgaagacaaagtattttaccggactgagtttcagaatcgtgaattcaaagccacaatgtgcaacctactggcctatctaaagcacctcaaagggcaaaacgaggcagccctggaatgcttacgtaaagctgaagagttaatccagcaagagcatgctgaccaggcagaaatcagaagtctggtcacctggggaaactatgcctgggtctactatcacatgggccgactctcagacgttcagatttatgtagacaaggtgagacatgtctgtgagaagttttccagtccctatagaattgagagtccagagcttgactgtgaggaagggtggacacggttaaagtgtggaggaaaccaaaatgaaagagcgaaggtgtgctttgagaaggctctggaaaagaagccaaagaacccagaattcacctctggactggcaatagcaagctaccgtctggacaactggccaccatctcagaacgccattgaccctctgaggcaagccattcggctgaatcctgacaaccagtaccttaaagtcctcctggctctgaagcttcataagatgcgtgaagaaggtgaagaggaaggtgaaggagagaagttagttgaagaagccttggagaaagccccaggtgtaacagatgtacttcgcagtgcagccaagttttatcgaagaaaagatgagccagacaaagcgattgaactgcttaaaaaggctttagaatacataccaaacaatgcctacctgcattgccaaattgggtgctgctatagggcaaaagtcttccaagtaatgaatctaagagagaatggaatgtatgggaaaagaaagttactggaactaataggacacgctgtggctcatctgaagaaagctgatgaggccaatgataatctcttccgtgtctgttccattcttgccagcctccatgctctagcagatcagtatgaagaagcagagtattacttccaaaaggaattcagtaaagagcttactcctgtagcgaaacaactgctccatctgcggtatggcaactttcagctgtaccaaatgaagtgtgaagacaaggccatccaccactttatagagggtgtaaaaataaaccagaaatcaagggagaaagaaaagatgaaagacaaactgcaaaaaattgccaaaatgcgactttctaaaaatggagcagattctgaggctttgcatgtcttggcattccttcaggagctgaatgaaaaaatgcaacaagcagatgaagactctgagaggggtttggagtctggaagcctcatcccttcagcatcaagctggaatggggaatggagaatagagatgtggtgcccactaggctactgctgatagggagctgaaattcctccaccaagttggtattcaaaatatgtaatgactggtatggcaaaagattggactaagacactggccataccactggacagggttatgttaacacctgaattgctgggtcttgagagagcccaaggagttctgggagagggaccagattggggggtaggtccacgggcttggtgatagaattatttctcgattgacttcttgagtgcaatttgaactgtaacatttgcttagtcacctttagtggagtaatccactgggcttgtttctatatttatataaagcagccaaatccttcatgtaatattgaagtccatttttgcaatgttgttccatacttggagtcattttgcatcccatagaggttagtcctgcatagccagtaatgtgctaagttcatccaaaagctgggggaccaaagtctaaatagggctcagtatcccccatcgcttatctctgcctccttcctcctccttcccagtctatcatcaaccttgagtattctacacaatgtgaattcaagtgcctgattaattgaggtggcaacatagtttgagacgagggcagagaacaggaagatacatagctagaagcgacgggtacaaaaagcaatgtgtacaagaagactttcagcaagtatacagagagttcacctctactctgccctcctcatagtcataatgtagcaagtaaagaatgagaatggattctgtacaatacactagaaaccaacataatgtatttctttaaaacctgtgtgaaaaaataaatgttccaccagtagggataggggaaaagtaaccaaaagagagaaagagaaaggaatgctggtttatctttgtagattgtaatcgaatggagaaatttgcagtattttagccactattaggaattttttttttttgtaaaatgaagactgaactctgttcaaatgctttcatgaacctggtttgagacggtaggaaagcaacaaaacgtgggaacctggtgactaagggcctggtgcaaggacttgggaaatgtcattaataatagatggtggggttttcccccctttagaaatgttggatattaagtgatataaacacttcttttaactccgaaaatcttctgagaaatcacaaaattcacggtatgcttggaacgattgagattttctaggtagatgctgaatagcctagacatcaaagttggtgtgaaccaaaatagagtcagctgacccagcatcagccacactctgggttggaaaatgtttgcctgttggaattaatttaagcttaagtatatatcaacattattttattgtgcaattaaaacaatacaaattcatggttttttaaagttaaaaattctaaccactgtaacaacagtttttgtgttattttctgtattaaacatcttgttgcacgcatttgaggtcatcagggtgcaaaatttgtattcctgaaaatgtcatatattttcattaataaataacctaaatatgataaaacataaaaaaaaaaaaaaa

SEQ ID NO: 130 - DNA, 3331 bp, Homo sapiens
gcccccaaaaagaggcgaacagaggaaaaatatggcggagacagcgaccatccgtccgatggagagacaagtgtgcagccgatgatgaccaagattaaaacagtgctcaaaagtcgtggccgcccacctacagagccgctgcccgacgggtggatcatgacattccataactctggagtcccggtgtacctacacagagagtctcgggtggtcacctggtccaggccatacttcttgggaacgggaagcatacggaaacacgaccctcctctgagtagcatcccttgtctgcattataagaaaatgaaggacaacgaggaacgggagcaaagcagtgacctcacccctagtggggatgtgtcccccgtcaagcccctgagccgatctgcagagctggagtttcccctggatgagcctgactctatgggtgctgacccggggcccccggacgagaaagacccactaggggctgaggcagcccctggggccctggggcaggtgaaggccaaagtcgaggtgtgcaaagatgaatccgttgatctcgaggaatttcgaagctacctggagaagcgttttgactttgagcaagttactgtgaaaaaattcaggacttgggctgagcggcggcaattcaatcgggaaatgaagcggaagcaggcggagtccgagaggcccatcttgccagccaatcagaagctcattactttatcagtgcaagatgcacccacaaagaaagagtttgttattaaccccaacgggaaatccgaggtctgcatcctgcacgagtacatgcagcgtgtcctcaaggtccgccctgtctataatttctttgaatgtgagaacccaagtgagccttttggtgcctcggtgaccattgatggtgtgacttacggatctggaactgcaagcagcaaaaaacttgcgaagaataaagctgcccgagctacactggaaatcctcatccctgactttgttaaacagacctctgaagagaagcccaaagacagtgaagaactcgagtattttaaccacatcagcatcgaggactcgcgggtctacgagctgaccagcaaggctgggctgttgtctccatatcagatcctccacgagtgccttaaaagaaaccatgggatgggtgacacgtctatcaagtttgaagtggttcctgggaaaaaccagaagagtgaatacgtcatggcgtgtggcaagcacacagtgcgcgggtggtgtaagaacaagagagttggaaagcagttagcctcacagaagatccttcagctgctgcacccacatgtcaagaactgggggtctttactgcgcatgtatggccgtgagagcagcaagatggtcaagcaggagacatcggacaagagtgtgattgagctgcagcagtatgccaagaagaacaagcccaacctgcacatcctcagcaagctccaagaggagatgaagaggctagctgaggaaagggaggagactcgaaagaagcccaagatgtccattgtggcgtccgcccagcctggcggtgagcccctgtgcaccgtggacgtgtgagggaggtggcacgggccagggcgcgggggccgccagccgcacttctgaggagaccagcagtcatgcatcgtgcaccacagtgtcaggcctccaacccacgctccttccctgtggccaacctgtgggcccggccttagggtggaggctttagtgtacagggacagccatggccacacagcacacatgtggagcagcggctctccctggaaagctccaggcctgaatggatggactcagcgactgcaccagtggcagctggtgactgtggacagtggtggaccctgcttctgtgcacctgctgcaggctctttttatgaaggctttcatgaattttagtatgtaatacgcactgacgacacatgatgcttggatgacagatgagaggggatggctgagtcctgtggctggcccgtgatgccaggtggcccatgtgcccagggcgcctgcagggctgctacagggacctggtcaggaggtgcacatggtgccctgccctcacccaccctctgtgtttccccttctttgaaaaggtagaagagaaaggaatattttaaacctttttggcttaaacagaattttagcatcagaactagctttctgggattggaggcaaaccatcaaggtggtccctctccagtctggacacgatgccagcaaggatgacgtcctgccacctcctggagttaccctggcctcctagggtccctttttctgatgaagtcttaatgccctaaaagcgcctctttggacactgaggccctctctgcctttcctggcctccggcaacagttttttacaaagattttttgcagtcgagtccatatgtccacccattgatttttaaagcttttgtgatattttagcattttgaaagactttcacagtgagagtagaaggtagatttggaatcatgcattttagcaagtggacttgttgaaacaggaagcaagggccttcagtgtagcccattcttgatccagagctgttgcctgtgacagcggtttctctggatgtcaaaggcagctgcctggtgcccagcttgcttctcgactggtggcccctatgggtgggtgtgcgatggaaatgtgttcctgccggagtctgaggcaccagggtgtgctcaaaggctggccctggtggtggactggcacctgtgcagagtgccgtgtgcttgtggtgcgccatctgaagcaagagtccagcgttctgccgtgtctgtcccccaccatgccccctacaggcggtactgacggcgctttttttttttttctgtcaggaaaacaatgttggcctgtgggccgcccacaacatatccttccctcactacctgtgtgaccaaggttggcttctgttgacctttaaaaaagaaaccctcaactcaaattgctataattagacacttgcttctgtcttgcctcctgtctgcagctgtgaatagtcatttgactgtgactgttgcccttagccagccagatgcgcctgtgaaccaaagcttcgtgcacatgtgttcccctaaaggttggggagcctcgctgtgtcttgctgttcccaggcaccaccacagcaggtgctgccatactcttgtggtctctgtgcgccccccccccccccacccgtctgccaagcatgggtatgaatcgtgcacacagccatgcttcaaggccggggcaggggagcctgtgctgatgccatccagagcactgggctgtgcctggaaggcgagccttgattgtctgaacacataaagcaaactgtccagaaaaaaaaaaaaaaaaaa

SEQ ID NO: 131 - DNA, 2819 bp, Homo sapiens
gcggcggggtcgctgccgttgaggcttcccgccactgctgctggcggatttgtggggcaaaatttctcgctggctagccttcttttccctcccgcactttggtggggagggggtggatcctcgtttcggtgcccaagttcacgatgacccgagagaactcgaggaagttgtcgccgcggccatttcccccagtgccgcaacttgctggccttggagggggaggagcgccgaggcagtgactgcgacgcaaacatcaaaccagatgcaaacagattcattatctccatcccctaatcctgtgtcacctgtgcctttgaataacccaacaagtgccccaagatatggaacagtgatccctaatcgcatctttgtaggaggaattgattttaagacaaacgaaagtgatttaagaaaatttttttcccagtatgggtctgtgaaagaagtgaagattgtaaatgacagagctggagtatccaaagggtatggtttcgtcacttttgaaacacaagaagatgcacaaaaaattttacaagaggctgaaaaacttaattataaggataagaagctgaacattggtccagcaataagaaaacaacaagtagggatccctcgttctagtataatgccagcagctggaacaatgtatctaacaacttcaactggatatccttatacttaccataatggtgttgcttattttcatactccagaggtaacttcggtcccaccgccttggccttcacgttctgtatgtagctcccctgtgatggtagctcagcccatttatcagcaacctgcatatcactaccaggccaccacacagtatttaccaggacagtggcagtggagtgttcctcagccttctgcctcttctgctccattcttatacctgcaaccttctgaggttatttatcaaccagtggaaattgcacaggatggtggatgtgttcctcctccactgtctctgatggaaacttcagttccagagccttattctgatcatggagttcaagcaacatatcaccaggtttatgctccaagtgccatcactatgcctgcgcctgtgatgcagcctgagccaattaaaacagtgtggagcattcattattaagacaattgggcagctctattccagctcaactgatttcttgtccaatgatccttgcgtggccgagatccagcttcaacgaaccagctagaagctgcccgttgtgaaacttagtgttagttaatacctcaccatactcagttattccactataagctgtctaaatttgatgaaatttgctttttcagctgttctacaaaattatttaggtagatgtggcatgttggttttttatgtgctaacctaactgtaatgaccttttctacaacatgttttatccattccataaataataaccacattgggaatagtgaggtgtcttttattttctctgctttgtgttattttttcttatcaaacaattagatgttatgtttcatattatttgatatttattttcatatttaggataagaatcatttttaattataatacttttaatactttcatatattttacaacagtatactatttaatattaatgacaattctatttttgctttgctgttttgtcatttaatatgcttttgtctaatttttaattcatttattactgttactccttatttaattttgcgtctgccatggttttcagaatctgaatagtatttatacttcttttttataacattttccaaatattagaaataccatcaacatgatcagtattcttgccttttcatgtaatttgactatattaaattttttctccagtgtttgagacaatattgaaatcttcctataacataatttatttggtatcaaattttataaaatatggatccacctttggaattttgataaaagggttcatctctgacatgatcccataacactgactgaaattccaccaaattactgttctttgaatgctttaatccttaaaccttttcttctgatatgcaaccaatatattcaattatatatgtgattaatttttaaaaggacaattgttttcataaaatgcaaaactattttttacaccaaaggaaaattttagattctgattctaaatccgatttttactataaaattggaaaatagatgggaggggtgtcattcattgttcaaaaggtacagaacaaatcataggggtttttaatctctaaaatttctacagtagtacaggaaatattcctctttacattcatttgcagttctttcactgacctcctaattttaggtggagggggcagggggagccataaaagttggtattaccctaataaatctatctctttcctcccctgtttcaaccccacatgtattccatgctcagcagcagcagcagaaatagtaggatatagatcacaaaggtttttctggtgagtcaaatagggtgttttcttttgaaactgtaatgaatatgtttgccagtcaaatggcttcatgagaacagtagaaccttatgaatgtatactagcatacaaggatctcaaatacattaattattctcagttttaggaatgtaaatagattaagtcccacaatgaaatttcagaagtttttgttctgtaagtaaaaaattactaaccactgatgttcaagattttcttttaatagcactatccttgagaaccaaaaagtttatgttttgattttcaaatgttaaacaagatgctaaacaaatcctggactgttaataaaaattaattatgtattattggataaaaaaaaaaaaaaaaaaaaaaaaaaaaaaaaaaaaaaa

SEQ ID NO: 132 - DNA, 2316 bp, Homo sapiens
cctgcacagagcagattctgaaacttcttgacaatttgcttgcgcttataagaacccacaatacattatatgcaccagaaatgctagccaaaatggcagagcctttcaccaaggctctggatatgcttgacgcggaaaaatctgctatattaggattacctcaacctctcttggaactcaatgactctcctgtcttcaaaaccgtcttggaaagaatgcagcgtttcttctctaccctctatgaaaactgttttcatatcctagggaaggcaggcccttccatgcagcaagacttctatactgtggaggaccttgctacccagcttctcagctcagcctttgtcaacttgaacaatattcctgactaccgactcagacccatgcttcgggtctttgtaaagcctctggtgctcttctgtcccccagagcactatgaagccctggtatcccccatcctcggacctcttttcacctacctccatatgaggctttctcagaaatggcaagttatcaaccaaaggagcctgctgtgtggagaagatgaggctgcagatgaaaacccagagtctcaagagatgctggaggagcaactggtgaggatgttaacccgagaagtcatggacctaatcacggtttgctgtgtttcaaagaagggtgctgaccacagtagtgctcccccagcagatggagacgatgaagaaatgatggccacagaggtcaccccctcagctatggcagagcttacagacctgggcaaatgtctgatgaagcatgaggatgtttgtacagcgctattaattacagccttcaattccctggcctggaaagatactctgtcctgccagaggacaacctcacagctctgctggcctctcctcaaacaagtgctgtcagggacactgctcgcagatgcagttacgtggcttttcaccagtgtgctgaaaggcttacagatgcacgggcagcacgacgggtgcatggcttccctggtccatctggccttccagatatacgaggcactgcgccccaggtacctggagataagagctgtaatggagcaaatccctgaaatacagaaggactcactggaccagtttgactgcaagcttttaaacccctccctgcagaaagtggctgacaagcgccgaaaggaccaattcaaacgcctcattgctggttgcattgggaaacccttgggagagcagttccgaaaagaagttcacattaagaatcttccctcacttttcaaaaaaacaaagccaatgctggagacggaggtgctggacaatgatgggggtggcctggccaccatctttgaaccctgaatcaagcttttgggcatccttcctcggcctttcttgtcatctcttctttccctttgtagccgatctctaggcccttcttgcactgccacctcactttccaccactgtcagcctggaaagagatccaggtctggagctggagagaacaggccctgtgcaggaccagaagtaattatactaaagtatcaagaaagggagttagggcttaaactattctgtctagatgtcccagatagttcccattctacttggagatttggcttttccaagaaaagctagagcagagcagcccttctcccacaagccctcccacccccgtgcagccacatacctgtacagaatggtaactaagggtgctgtgcccaaccctgcgactagcaaggctcgcagcaagagcacagccctcaactacttgtgccagagtttctcttggaccactccaactcccactgagcccttttgctgctgggctggcaggaaactttccccactccctaaggggcatgtctgggttaggtgctaagtgctgaagagaacttggtcagttctctcaactttgctttgggcaagaatctggtcacctgatgggatccatggtacaggctactgctaaacttggcacagtatcaagtatagtacctccaaggaccagggctgggcagtctttagtgctaacatcccctttagagttcacacatcttgcccttccatgaatgacccctcagtctggcctccccagcctcaaggtccactcaggcacaagagccacagtaccctagatagtgtcacatgacaccgttgtcatccaaggataatacagaccaactaggctacatctgtgatgagcagctagcaaagccgctggtcttctcctaggactaagtccaggtgccttccacaatctcatggtctttcaggtccctggttacttttctcaaaggccatttccaaaagaatacatgccttcacatcaaaaaaaaaaaaaaaaaaaa

SEQ ID NO: 133 - DNA, 3286 bp, Homo sapiens
agtcagtcggcctgcgctcctcagcctggcggttctacctccgagggttcgcccgcccttggttttccttacaccttagcctttggctcctttgaccactcgaagccccacagcgtgttccagcggacttcaccagcagacccagaagtggtgggtgaaacactgcctctgttcctccttgagcctgtcgggagctgctgcctgccaccaccatgtctgctgcaaatcctgagactccaaactcaaccatctccagagaggccagcacccagtcttcatcagctgcagctagccaaggctgggtgttaccagaaggcaaaatcgtgccaaacactgtttttgttggtggaattgatgctaggatggatgaaactgagattggaagctgctttggtagatacggttcagtgaaagaagtgaagataatcacgaatcgaactggtgtgtccaaaggctatggatttgtttcgtttgttaatgacgtggatgtccagaagatagtaggatcacagatacatttccatggtaaaaagctgaagctgggccctgcaatcaggaaacaaaagttatgtgctcgtcatgtgcagccacgtcctttggtagttaatcctcctcctccaccacagtttcagaacgtctggcggaatccaaacactgaaacctacctgcagccccaaatcacgccgaatcctgtaactcagcacgttcaggcttactctgcttatccacattcaccaggtcaggtcatcactggatgtcagttgcttgtatataattatcaggaatatcctacttatcccgattcagcatttcaggtcaccactggatatcagttgcctgtatataattatcagccatttcctgcttatccaagatcaccatttcaggtcactgctggatatcagttgcctgtatataattatcaggcatttcctgcttatccaaattcaccatttcaagtcgccactggatatcagttccctgtatacaattatcagccatttcctgcttatccaagttcaccatttcaggtcactgctggatatcagttgcctgtatataattatcaggcatttcctgcttatccaaattcaccatttcaagtcgccactggatatcagttccctgtatacaattatcaggcatttcctgcttatccaaattcaccagttcaggtcaccactggatatcagttgcctgtatacaattatcaggcatttcctgcttatccaaattcagcagttcaggtcaccactggatatcagttccatgtatacaattaccagatgccaccgcagtgccctgttggggagcaaaggagaaatctgtggaccgaagcatacaaatggtggtatcttgtctgtttaatccagagaagagactgataaattccgttgttactcaagatgactgcttcaagggtaaaagagtgcatcactttagaagaagtttggcagtatttaaatctgttggatcctctcagctatctagtttcatgggaagttgctggttttgaatattaagctaaaagttttccactattacagaaattctgaattttggtaaatcacactgaaactttctgtataacttgtattattagactctctagttttatcttaacactgaaactgttcttcattagatgtttatttagaacctggttctgtgtttaatatatagtttaaagtaacaaataatcgagactgaaagaatgttaagatttatctgcaaggatttttaaaaaattgaaacttgcattttaagtgtttaaaagcaaatactgactttcaaaaaagtttttaaaacctgatttgaaagctaacaattttgatagtctgaacacaagcatttcacttctccaagaagtacctgtgaacagtacaatatttcagtattgagctttgcatttatgatttatctagaaatttacctcaaaagcagaatttttaaaactgcatttttaatcagtggaactcaatgtatagttagctttattgaagtcttatccaaacccagtaaaacagattctaagcaaacagtccaatcagtgagtcataatgtttattcaaagtattttatcttttatctagaatccacatatgtatgtccaatttgattgggatagtagttaggataactaaaattctgggcctaattttttaaagaatccaagacaaactaaactttactgggtatataaccttctcaatgagttaccattcttttttataaaaaaaattgttccttgaaatgctaaacttaatggctgtatgtgaaatttgcaaaatactggtattaaagaacgctgcagcttttttatgtcactcaaaggttaatcggagtatctgaaaggaattgtttttataaaaacattgaagtattagttacttgctataaatagatttttatttttgttttttagcctgttatatttccttctgtaaaataaaatatgtccagaagaggcatgttgtttctagattaggtagtgtcctcattttatattgtgaccacacagctagagcaccagagcccttttgctatactcacagtcttgttttcccagcctcttttactagtctttcaggaggtttgctcttagaactggtgatgtaaagaatggaagtagctgtatgagcagttcaaaggccaagccgtggaatggtagcaatgggatataatacctttctaagggaaacatttgtatcagtatcatttgatctgccatggacatgtgtttaaagtggctttctggcccttctttcaatggcttcttccctaaaacgtggagactctaagttaatgtcgttactatgggccatattactaatgcccactggggtctatgatttctcaaaattttcattcggaatccgaaggatacagtctttaaactttagaattcccaagaaggctttattacacctcagaaattgaaagcaccatgactttgtccattaaaaaattatccatagtttttttagtgcttttaacattccgacatacatcattctgtgattaaatctccagatttctgtaaatgatacctacattctaaagagttaattctaattattccgatatgaccttaaggaaaagtaaaggaataaatttttgtctttgttgaagtatttaatagagtaaggtaaagaagatattaagtccctttcaaaatggaaaattaattctaaactgagaaaaatgttcctactacctattgctgatactgtctttgcataaatgaataaaaataaactttttttcttcaaaaaaaaaaaaaaaa

SEQ ID NO: 134 - DNA, 3288 bp, Homo sapiens
agtcggcctgcgctcctcagcctggcggttctacctccgagggttcgcccgcccttggttttccttacaccttagcctttggctcctttgaccactcgaagccccacagcgtgttccagcggacttcaccagcagacccagaagtggtgggtgaaacactgcctctgttcctccttgagcctgtcgggagctgctgcctgccaccaccatgtctgctgcaaatcctgagactccaaactcaaccatctccagagaggccagcacccagtcttcatcagctgcagctagccaaggctgggtgttaccagaaggcaaaatcgtgccaaacactgtttttgttggtggaattgatgctaggatggatgaaactgagattggaagctgctttggtagatacggttcagtgaaagaagtgaagataatcacgaatcgaactggtgtgtccaaaggctatggatttgtttcgtttgttaatgacgtggatgtccagaagatagtaggatcacagatacatttccatggtaaaaagctgaagctgggccctgcaatcaggaaacaaaagttatgtgctcgtcatgtgcagccacgtcctttggtagttaatcctcctcctccaccacagtttcagaacgtctggcggaatccaaacactgaaacctacctgcagccccaaatcacgccgaatcctgtaactcagcacgttcaggcttactctgcttatccacattcaccaggtcaggtcatcactggatgtcagttgcttgtatataattatcaggaatatcctacttatcccgattcagcatttcaggtcaccactggatatcagttgcctgtatataattatcagccatttcctgcttatccaagatcaccatttcaggtcactgctggatatcagttgcctgtatataattatcaggcatttcctgcttatccaaattcaccatttcaagtcgccactggatatcagttccctgtatacaattatcagccatttcctgcttatccaagttcaccatttcaggtcactgctggatatcagttgcctgtatataattatcaggcatttcctgcttatccaaattcaccatttcaagtcgccactggatatcagttccctgtatacaattatcaggcatttcctgcttatccaaattcaccagttcaggtcaccactggatatcagttgcctgtatacaattatcaggcatttcctgcttatccaaattcagcagttcaggtcaccactggatatcagttccatgtatacaattaccagatgccaccgcagtgccctgttggggagcaaaggagaaatctgtggaccgaagcatacaaatggtggtatcttgtctgtttaatccagagaagagactgataaattccgttgttactcaagatgactgcttcaagggtaaaagagtgcatcactttagaagaagtttggcagtatttaaatctgttggatcctctcagctatctagtttcatgggaagttgctggttttgaatattaagctaaaagttttccactattacagaaattctgaattttggtaaatcacactgaaactttctgtataacttgtattattagactctctagttttatcttaacactgaaactgttcttcattagatgtttatttagaacctggttctgtgtttaatatatagtttaaagtaacaaataatcgagactgaaagaatgttaagatttatctgcaaggatttttaaaaaattgaaacttgcattttaagtgtttaaaagcaaatactgactttcaaaaaagtttttaaaacctgatttgaaagctaacaattttgatagtctgaacacaagcatttcacttctccaagaagtacctgtgaacagtacaatatttcagtattgagctttgcatttatgatttatctagaaatttacctcaaaagcagaatttttaaaactgcatttttaatcagtggaactcaatgtatagttagctttattgaagtcttatccaaacccggtaaaacagattctaagcaaacagtccaatcagtgagtcataatgtttattcaaagtattttatcttttatctagaatccacatatgtatgtccaatttgattgggatagtagttaggataactaaaattctgggcctaattttttaaagaatccaagacaaactaaactttactgggtatataaccttctcaatgagttaccattcttttttataaaaaaaattgttccttgaaatgctaaacttaatggctgtatgtgaaatttgcaaaatactggtattaaagaacgctgcagcttttttatgtcactcaaaggttaatcggagtatctgaaaggaattgtttttataaaaacattgaagtattagttacttgctataaatagatttttatttttgttttttagcctgttatatttccttctgtaaaataaaatatgtccagaagaggcatgttgtttctagattaggtagtgtcctcattttatattgtgaccacacagctagagcaccagagcccttttgctatactcacagtcttgttttcccagcctcttttactagtctttcaggaggtttgctcttagaactggtgatgtaaagaatggaagtagctgtatgagcagttcaaaggccaagccgtggaatggtagcaatgggatataatacctttctaagggaaacatttgtatcagtatcatttgatctgccatggacatgtgtttaaagtggctttctggcccttctttcaatggcttcttccctaaaacgtggagactctaagttaatgtcgttactatgggccatattactaatgcccactggggtctatgatttctcaaaattttcattcggaatccgaaggatacagtctttaaactttagaattcccaagaaggctttattacacctcagaaattgaaagcaccatgactttgtccattaaaaaattatccatagtttttttagtgcttttaacattccgacatacatcattctgtgattaaatctccagatttctgtaaatgatacctacattctaaagagttaattctaattattccgatatgaccttaaggaaaagtaaaggaataaatttttgtctttgttgaagtatttaatagagtaaggtaaagaagatattaagtccctttcaaaatggaaaattaattctaaactgagaaaaatgttcctactacctattgctgatactgtctttgcataaatgaataaaaataaactttttttcttcaaatgcaaaaaaaaaaaaaaaa

SEQ ID NO: 135 - DNA, 2928 bp, Homo sapiens
gcggcagcagcgggtcccgggactgaggcagcagcgggggcggcggcgggcggaagctgaggtgacgaaggcagcggcggcggcggccgtttccctcacggtggcggagaccaaggcggcggcggcggacggggagcggcccggccccggccccctgctcgttggctgtggcagggccgccgtggggccggcccggctcccgccccccgcggctccccctccggctcctcctccggggagacgccgggggcctggcccggcccgcactcagactgctgctgcagccgccgccgggggagtcggaggcggtggcggcgccatgggcggcctggcctctgggggggatgtggagccgggactgcccgtcgaggtgcgcggctccaacggggccttctacaagggctttgtgaaggatgtccatgaagactctgtcaccatcttctttgaaaacaactggcagagtgagagacaaattccttttggggatgtccggctaccacctccagctgactataataaggagatcacagaaggggatgaagtggaggtttattctcgagccaatgaacaggaaccttgtggctggtggctggcccgggtgcggatgatgaagggagatttctatgtcattgaatatgctgcctgtgatgccacctacaatgaaattgttaccctggagcgacttcggccagttaatcccaatccccttgcaaccaaaggcagcttcttcaaggttaccatggctgtgcccgaggatctgagagaagcctgctccaatgaaaacgtccataaagagttcaagaaagccctgggagccaactgcatctttctcaacatcacaaacagtgagctcttcattctgtcaaccacagaagcccctgtgaagcgagcatctctgctgggtgatatgcatttccgaagcctgcgcaccaaactgctacttatgtcccgcaatgaagaagctaccaagcacctagagacaagcaagcagttggcagcagccttccaagaggagttcacagtgcgagaggacctgatgggactggcaattgggactcacggtgccaacatccagcaggcccgaaaagtacctggggtgaccgccattgagttgggtgaagagacctgcactttccgcatctatggggagactcccgaggcttgccgacaggcccgaagctaccttgagttttctgaggactcagtgcaagtgcccaggaacctggttggcaaagtgattggaaagaacgggaaagtgatccaggagattgtggataaatctggtgtggtgagggttcgagtggaaggtgataatgacaagaagaaccccagggaggagggaatggttcccttcatttttgttggcacccgagagaacatcagcaatgcccaggctttgctggagtatcacctctcctacctgcaggaggtagagcagcttcgcttggagaggctacaaattgatgagcagcttcggcagattgggctgggctttcgccctcctgggagtgggcggggcagcggtggcagcgacaaggctggatatagcactgatgagagctcctcctcctccctccatgcgactcgaacctatgggggcagctatgggggccgtggccgtggccggaggacaggcggtcctgcctatggccccagctcagatgtgtctacagcttcagagactgagtcagagaagagagaggagcccaaccgagctgggcctggcgacagggatcccccaacccgaggggaagaaagccggaggcggccgactgggggccggggtaggggacccccacctgccccccggcccacttcgagatacaattcttcatctattagctcagtgctgaaggatccagacagtaatccctacagcctattggacacgtctgaaccagagcccccggttgattcagaacctggggaaccccccccagcaagtgccaggcgccgccgctcccgccgccgccgcactgatgaagacaggaccgtcatggatggaggcctggaatcagatgggcccaacatgacagagaatggcctggaagatgaatcaagacctcaacgtcgtaatcgcagccgccgccgccgtaaccgtggtaatcggactgatggctctatcagtggagaccgccagccagtgactgtggctgactatatctcacgagcagagtctcagagccgccagaggccacccctggaacgcactaaaccctcagaagactctctttcaggacagaagggtgactctgtcagcaagcttcctaagggcccctcggagaatggggagctctccgcccccttggagttgggtagtatggtgaatggggtttcataaaacctccaacctgcacccctcccttctccatctcgcttgctgcccaacaccatggccctcacaggcccaactgacctgcgctggagctgctcttatctaggggggaggggggtggcacagcagcttgggtaccccccaacctccaggagctagtggaggggtgtgtaacagggtcataccccctccctcttgtccaccctacccccagggtaaggggagcctctctccttccccatcagactggatgtgcctttatcctctaatgccccaatctctctctgaacacccccattctccacctgttggtggggggtgctcctcgacccacccagatttgaccgttcagggggcctcccctgctatccctcctcccatcctgtaccccccatttctggggcctcatcactgtggaagacggggatagtaagagataagtgggtgggaggcacggggaaggttttggagtagaaccaggggtgtgtatgaaggggggtgacaaggtccccctggggaggggaccaaccttgtctggtggatgagaaggcgtatttatttttcactgtacagtatttaaaaaaaaaaaaaaa

SEQ ID NO: 136 - DNA, 1444 bp, Homo sapiens
gggggcagcttgcaaatggcgtctccctcgctggagcggccagaaaaaggcgctggaaaaagtgaatttcgtaaccagaagccgaagccggagaaccaagatgaatcagaactccttacggttcctgatggttggaaggaaccagctttttccaaagaggacaatcccagaggacttttggaggagagcagtttcgcaactttgttcccaaaatacaggggagcttacttgaaagagtgttggccattggtgcagaaagccttaaatgaacatcatgttaatgcaaccctggacctgatcgaaggcagcatgactgtttgtactacaaagaagacttttgatccatatatcatcattagggccagagatctgataaaactgttagcaaggagtgtttcatttgaacaggcagtacgaattcttcaggatgatgttgcatgtgacatcattaaaataggttctttagtaaggaataaagagagatttgtaaaacgaagacaacggcttattggtcccaaaggatctacattgaaggcattggaactcttaactaattgttacattatggttcagggaaacacagtttcagccattggaccttttagtggcttaaaagaggttagaaaagtagtccttgatactatgaagaatattcatccaatttataacattaaaagcttaatgattaagagagagttggcaaaagattctgaattacgatcacaaagttgggagagatttttgccacagttcaaacacaaaaatgtgaataaacgcaaggaaccaaagaaaaaaactgttaagaaagaatatacgccattcccaccaccacaaccagaaagtcagatcgataaagaattggctagtggtgaatactttttgaaggcaaatcagaagaagcggcagaaaatggaagcaataaaggctaaacaagcagaagccatcagtaagagacaagaggaaagaaacaaagcatttattccacctaaggaaaaaccaattgtgaaacctaaggaagcttctactgaaactaaaattgatgtggccagcatcaaggaaaaggttaagaaagcaaagaataagaaactgggagctcttacagctgaagaaattgcacttaagatggaggcagatgaaaagaaaaagaagaaaaaaaagtaacatacccaaaactccttgactagaactatctccttttgtaaaggattttgagatatcaggcattagttgccttatttgtgagaaattttctgagggctttttttttttggtggtggtggttgttcatagaagagtgttctttataaattatattattattgtattttttgaaaaatttatactagaaagtggtatatatgtctttgtatacattacgaccattgtgattatccattaaatccagtgtctgatgcaaaaaaaaaaaaaaaaaaaaaaaaaaaaa

SEQ ID NO: 137 - DNA, 2106 bp, Homo sapiens
gggagcgaggggcgccggctggggtgtgtgctcctgagctcttcagaaaccaggctgctttcaggaacattgctgtggattcccagggcctattccgctagaagcaagatggctgaactcaatactcatgtgaatgtcaaggaaaagatctatgcagttagatcagttgttcccaacaaaagcaataatgaaatagtcctggtgctccaacagtttgattttaatgtggataaagccgtgcaagcctttgtggatggcagtgcaattcaagttctaaaagaatggaatatgacaggaaagaagaacaataaaagaaaaagaagcaagtccaagcagcatcaaggcaacaaagatgctaaagacaaggtggagaggcctgaggcagggcccctgcagccgcagccaccacagattcaaaacggccccatgaatggctgcgagaaggacagctcgtccacagattctgctaacgaaaaaccagcccttatccctcgtgagaaaaagatctcgatacttgaggaaccttcaaaggcacttcgtggggtcacaggcccaaatattgagaaatcagtgaaggatttgcaacgctgcaccgtttctctaactagatatcgcgtcatgattaaggaagaagtggatagttccgtgaagaagatcaaagctgcctttgctgaattacacaactgcatcattgacaaagaagtttcattaatggcagaaatggataaagttaaagaagaagccatggaaatcctgactgctcgtcagaagaaagcagaagaactaaagagactcactgaccttgccagtcagatggcagagatgcagctggccgaactcagggcagaaattaagcactttgtcagcgagcgtaaatatgacgaggagctcgggaaagctgcccggttttcctgtgacatcgaacagctgaaggcccaaatcatgctctgcggagaaattacacatccaaagaacaactattcctcaagaactccctgcagctccctgctgcctctgctgaatgcgcacgcagcaacctctgggaaacagagtaacttttcccgaaaatcatccactcacaataagccctctgaaggcaaagcggcaaaccccaaaatggtgagcagtctccccagcaccgccgacccctctcaccagaccatgccggccaacaagcagaatggatcttctaaccaaagacggagatttaatccacagtatcataacaacaggctaaatgggcctgccaagtcgcagggcagtgggaatgaagccgagccactgggaaagggcaacagccgccacgaacacagaagacagccgcacaacggcttccggcccaaaaacaaaggcggtgccaaaaatcaagaggcttccttggggatgaagacccccgaggccccggcccattctgaaaagccccggcgaaggcagcacgctgcagacacctcggaggccaggcccttccggggtagtgtcggtagggtttcacagtgcaatctctgccccacgagaatagaagtttccacagatgcagcagttctctcagtcccggctgtgacgttggtggcctgagctaggaggaaaaagagcagttttcactcagttttggttccctgcccgaggtgctgacccaattcgctgccaaaagagtgtcaatcagaatatacaaatcccgtatggttgtgtcatcctctcttaatcatttttactaattctaataatcagctctagcttgcttcataattttcatggctttgcttgatctgttgatgctttctctcatcaagactttgcagcattttagccaggcagtatttactcattattaggaaaatcaagatgtggctgaagatcagaggctcagttagcaacctgtgttgtagcagtgatgtcagtccattgattgtctttagagagttaatgttacaaaaaagaattcttaataatcagacaaacatgatctgctgaggacacatgcgcttttgtagaatttaacatctggtgtttttctgaaaaaatatatatacatatattgctttatttgaaacaaattaaaatatgctgcatttgaaaaaaaaaaaaaaaaaaaaaaaaaaaaaaaaa

SEQ ID NO: 138 - DNA, 1699 bp, Homo sapiens
catggctccagtggagcacgttgtggcggatgctggggctttcctgcggcatgcggctctgcaggacatcgggaagaacatttacaccatccgggaggtggtcactgagattcgggacaaggccacacgcaggcggctcgctgtcctgccctacgagctgcggttcaaggagcccttaccggaatacgtgcggctggtgactgagttttcaaagaaaacaggagactaccccagcctctctgccacggacatccaagtgcttgcactcacataccagttggaagcagagtttgttggggtgtctcacctaaaacaagaaccacagaaggttaaggtgagctcatcgattcagcacccagaaacacctctgcacatttctggtttccatctgccctacaagcctaaacccccacaagaaacagaaaaaggacactcagcttgtgagcctgagaacctggaatttagttccttcatgttctggagaaaccctttgcccaacatcgatcatgaactgcaggagctgctgattgacagaggtgaggacgttccaagtgaggaggaggaggaggaagaaaacgggtttgaagacagaaaagatgacagcgatgacgacgggggtggctggataacccccagtaacatcaagcagatccagcaggagctggagcagtgtgacgtccccgaggacgtgcgggttggctgcctgaccacagacttcgccatgcagaatgttctgctgcagatggggctgcacgtgctggcggtgaacggcatgctgattcgtgaggcccggagctacatcttgcgctgccatggctgtttcaagacaacgtctgacatgagccgagtgttctgctcacactgtgggaacaagaccctgaagaaagtgtccgtgaccgtcagcgacgacggcaccctgcacatgcacttctcccgcaaccccaaggtgctgaacccccgcggcctccggtactcgcttcccactcccaaagggggcaaatacgccatcaacccccatctcaccgaggatcagcgcttccctcagctgcgactctcccaaaaggccaggcagaaaaccaacgtgttcgcccctgactacatcgccggggtgtcaccctttgtcgagaatgacatctccagccgctcagctaccctgcaggtccgggacagcaccttgggagctgggcggagacgcttaaatcccaacgcttccagaaagaagtttgtgaagaaaaggtgaagagcgagttcccgcaggcaaattggatgggcgtctggccgccgtggagttccggtgacccatttccccagccgtgtcgtctccaggaccacccgatggaaataacaggcgggcttcacggtgcggctctgtccgcccatgccccgctgggtctgcagggaactggactgtcccatggcctgtgagcaccggagcgcctggctgcctgccaaggaagtgcaattgcataaaaacagaaagaacaacgccctggagccaatcttcaagaaaggaatttccaaaggataatatttttctaataaatgcggctgcaacctcctgtgcatttaattaaataggccaaatttttgctgcttaggtcatctcaaggctgatacttgagctgtgtgcccagagatcatgcatttagatttatatttttgccagaaaatacaaggttataataaaaaaaaaaaaaaa

SEQ ID NO: 139 - DNA, 2625 bp, Homo sapiens
ccttgtcgcacgtcgcagcgcctggcgcccgggaagaggtggttgtgaggcagacgaactcgcggctctccggcttccgaggcttccgagttgtcggaggaagggggcggcgagcaataagaacccgccgcacccggtcctcagcgactcttctgacctccgcgcgacgtacccgccgccgccgttggctggagcatttgacattgtgcagcaaagaaatggttatggagaagcccagtccgctgcttgtagggcgggagtttgtgaggcaatattatactttgctgaataaagctccggaatatttacacaggttttatggcaggaattcttcctatgttcatggtggagtagatgctagtggaaagccccaggaagctgtttatggccaaaatgatatacaccacaaagtattatctctgaacttcagtgaatgtcatactaaaattcgtcatgtggatgctcatgcaaccttgagtgatggagtagttgtccaggtcatgggtttgctgtctaacagtggacaaccagaaagaaagtttatgcaaacctttgttctggctcctgaaggatctgttccaaataaattttatgttcacaatgatatgtttcgttatgaagatgaagtgtttggtgattctgagcctgaacttgatgaagaatcagaagatgaagtagaagaggaacaagaagaaagacaaccatctcctgaacctgtgcaagaaaatgctaacagtggttactatgaagctcaccctgtgactaatggcatagaggagcctttggaagaatcctctcatgaacctgaacctgagccagaatctgaaacaaagactgaagagctgaaaccacaagtggaggagaagaacttagaagaactagaggagaaatctactactcctcctccggcagaacctgtttctctgccacaagaaccaccaaagccaagagtcgaagctaaaccagaagttcaatctcagccacctcgtgtgcgtgaacaacgacctagagaacgacctggttttcctcctagaggaccaagaccaggcagaggagatatggaacagaatgactctgacaaccgtagaataattcgctatccagatagtcatcaactttttgttggtaacttgccacatgatattgatgaaaatgagctaaaggaattcttcatgagttttggaaacgttgtggaacttcgcatcaataccaagggtgttgggggaaagcttccaaattttggttttgtggtttttgatgactctgaaccagttcagagaatcttaattgcaaaaccgattatgtttcgaggggaagtacgtttaaatgtggaagagaaaaaaacaagagctgcaagagagcgagaaaccagaggtggtggtgatgatcgcagggatattaggcgcaatgatcgaggtcccggtggtccacgtggaattgtgggtggtggaatgatgcgtgatcgtgatggaagaggacctcctccaaggggtggcatggcacagaaacttggctctggaagaggaaccgggcaaatggagggccgcttcacaggacagcgtcgctgaagctccactgttggcaaagtcttggcagtggtacattattcatcgtgtttgcattcttgttaattttttttttggctttggaatgtgacacagcctttttgatcatttctttgatgtgaaaagcatctttggttatcagttaaattgaggtggacattatttccccaatttcacaacaggattcacattgttaatttataaatctagacttggagaattaaggactgagaaatgaccatatcttaaactatctacgacaaagtgaacttaaaaggacatgcccactgaattcaggtcctttgagtaaaaaaaaaatcttctgctgcacattttgtttaagtgttactgtttctgcctgttaatgctgggaacacaaatagtgcaatttgtgcaattggagaatcttgccttttttcttggctccccccaaaaatacaaaccaacagaaacttgttatgcactcatcaaaatgtactaatgggtactctgaactcattaacattgacatctgcaacaggaggcaacagggaaaaaatctcatcttcttttccagtagaaaatagtttgtgaaatgatgagggcattttatctgcttgctgtgaccagcgtgtgtacacataaaccttaacaagactacaagtatattccagaaggaaatcattttagttatgaactaaataataaaaattagaacttcaaatgcgatggtcttgactattagaccagatttagtagctccatatctaagatttttctacctgcccctcttcagtacagggatggctggctgctcaacacactcctcctcccctttttttcctttctttaagctgtgtacagtgaaaattgtctttactgtatttttgttctctggtaatgtaataagcatgatggtgccttctattaatacatcattccagtcttgctggtaattttgtacagtatagtgtatgaattgctgtgctgcaaagccaaacagctgcaaaatgttgaaaaatcatcgaaatgtataaaaattgcagtatctttaaaatcagtaaaaaaaaaaaaaaaaaaa

SEQ ID NO: 140 - DNA, 3610 bp, Homo sapiens
agcggggtcttcccctgaggccgcgcggagctgggcgactggggcgaggactcgcgcacaggtaattaaccagaacaggatcgacacgtgttctctacagcccgtccatggatcctttccgaccatcgttcaggggccagtctcctatccacccatcccagtgccaggctgtacggatgccaggctgttggccacaagcttctaaacctttggacccagctctgggcaggggagcacctgcaggcagaggccatgtatttggaaagccagaggaaccaagcacacagagggggccagcacaaagggagtctgtgggtttggtctccatgttccgaggcctgggcattgaaacagtttctaagacccctctgaaacgggaaatgcttccatcaggtagaggcattttaggtcgaggcttgtctgctaatctggtacgcaaggacagggaggaactctctcccactttttgggatccaaaagtgttggcggctggggacagcaagatggcagagacctccgttggttggagtaggacgcttggaagagggagttcagatgcgtctttattaccactgggaagagcagcaggtggtatcagcagagaagtggacaagcctccctgtaccttcagcacaccgtcccggggtcccccgcagctgtcatcaccaccagctctgccccagtctcccctgcactctccagatcgccctctggtcctgactgtggaacacaaggaaaaagagcttattgtgaagcaaggatcaaaaggaacacctcagtctttgggactgaacctcgtcaaaatacagtgtcataatgaagcagtttatcaatatcatgtgactttcagccccaatgtggagtgcaaaagcatgaggttcggcatgttgaaggaccatcaagctgtcaccggcaacgtcactgcgtttgatggatctattctctatctgcctgttaagcttcaacaagttcttgagttaaaaagtcaaaggaaaacagacagtgctgaaatcagcattaagattcagatgacaaagatcctggagccctgctctgacctgtgcattcccttctacaatgttgttttccgtcgggtaatgaaacttttagatatgaagcttgtggggagaaacttttatgaccctacaagtgctatggtactacagcaacacagattgcagatctggccaggctatgcagctagcatccgaaggacagatggagggctcttcctgctagctgatgtctcccataaggtcattcggaatgactgtgtgctggatgtcatgcatgccatttatcagcagaataaagaacacttccaggatgagtgtactaagcttctggttggcaatattgttatcacccgatataacaatcgtacctatcgtattgatgatgtggattggaataagactccaaaggatagcttcacgatgtctgatgggaaagagatcacattcttggaatactacagcaaaaattatgggatcacagttaaggaagaggaccagccattgctgattcacaggcccagtgagagacaggataatcatgggatgctgctaaaaggggaaatcctgctgctgcctgagctttcttttatgaccggaatcccagagaagatgaagaaggacttcagagccatgaaggatttggctcagcaaatcaatctgagccccaagcaacaccatagtgctttggaatgcttgctgcaaagaattgcaaagaacgaggcagccaccaatgaactgatgcgttgggggctccgtctgcaaaaggatgtacataagattgaaggacgtgttctgccaatggaaagaattaacttaaaaaatacttcgtttatcacatctcaggaactaaactgggttaaggaagtaaccagagacccttccatcttgactatccccatgcatttctgggcacttttttacccaaagagagcaatggaccaggctcgagaactggtcaacatgttggagaagatagccggccccattggcatgcgtatgagcccaccggcctgggttgaactaaaggatgaccgaatagagacttatgtcagaaccattcaatccacgttaggagctgaggggaagatacagatggttgtttgcatcatcatgggcccacgtgatgatctctatggggccatcaagaagctgtgctgtgtgcagtccccagtgccctcccaggttgtcaatgttcgaaccattggtcagcccaccaggcttcggagtgtggcccagaagattttacttcagattaactgtaaattgggtggtgagctctggggagtggatattcctctgaaacagttaatggtgatcgggatggatgtttaccatgaccccagtagaggcatgcgctccgtggttggcttcgtggcaagcatcaatctcaccctcacaaaatggtattcccgggtggtgttccagatgccgcatcaggagattgtggacagcctgaagctatgcctcgtgggctccttaaaaaagttttatgaggtgaaccactgtctaccagagaagattgtggtgtaccgtgatggagtgtctgatggccaactgaagacagttgccaactatgagattcctcaactacagaagtgttttgaagcttttgagaattatcagcccaagatggtggtgtttgtagttcagaagaaaatcagtactaatctatatctggctgctcctcagaactttgtaactcccactcctggaactgtggtagatcatacaataacaagctgtgagtgggtggatttctatcttcttgcccatcatgtacggcagggctgtggcattcctacgcattatgtctgtgttctcaacaccgcaaacctgagccctgatcatatgcagaggctgactttcaaactgtgccacatgtactggaattggcctggcaccatcagagttccagctccttgcaagtatgcccacaagctagctttcctgtcaggacacatcttgcatcatgaaccagccatccagctgtgcgagaacctgttcttcctgtgactgcacagcttggagatgggctggtgagaagaaaggcggcctcagaactcagctgtgactcttgcagaatcaacagagactgaagtgggcttttgtgttataattttccctttctccaaccctgtagaataagatttctttcttgtcttttaaacctaatatcaccaagaagcaagtttctgagtaacagctgaaaatggccttgttgcctgtgtagagcaagttacggtggtactgccactctgcaggtggagcgggtgactctgggggaccattaagacctccagaccgggtgcggtggttcacacctgtaatccaagcactttgggaggccgaggcgggtggatcatgaggtcaggagatcaagaccatcctggccaacatggtgaaaccccgtctctactaaaatacaaaaaattagccgggtgtggcggtgcacgcctgtagtcccagctactcaggaggctaaggcaggagaatcgcttgaacccgggaggtggaggttgcagtgagccgagatcacgccactgcactccagcctgttgacaaagcaagactctgtctcaaaaaaaaaaaaaaaa

SEQ ID NO: 141 - DNA, 1399 bp, Homo sapiens
ggcggaaaaccgaagttggaagtgtctcttagcagcgcgcggagaagaacggggagccagcatcatggcagaacaggatgtggaaaacgatcttttggattacgatgaagaggaagagccccaggctcctcaagagagcacaccagctccccctaagaaagacatcaagggatcctacgtttccatccacagctctggcttccgggactttctgctgaagccggagctcctgcgggccatcgtggactgtggctttgagcatccttctgaggtccagcatgagtgcattccccaggccatcctgggcatggacgtcctgtgccaggccaagtccgggatgggcaagacagcggtcttcgtgctggccaccctacagcagattgagcctgtcaacggacaggtgacggtcctggtcatgtgccacacgagggagctggccttccagatcagcaaggaatatgagcgcttttccaagtacatgcccagcgtcaaggtgtctgtgttcttcggtggtctctccatcaagaaggatgaagaagtgttgaagaagaactgtccccatgtcgtggtggggaccccgggccgcatcctggcgctcgtgcggaataggagcttcagcctaaagaatgtgaagcactttgtgctggacgagtgtgacaagatgctggagcagctggacatgcggcgggatgtgcaggagatcttccgcctgacaccacacgagaagcagtgcatgatgttcagcgccaccctgagcaaggacatccggcctgtgtgcaggaagttcatgcaggatcccatggaggtgtttgtggacgacgagaccaagctcacgctgcacggcctgcagcagtactacgtcaaactcaaagacagtgagaagaaccgcaagctctttgatctcttggatgtgctggagtttaaccagcctgtcacgctatcagcagttcaaggatttccagcggcggatcctggtggccaccaatctgtttggccgggggatggacatcgagcgagtcaacatcgtctttaactacgacatgcctgaggactcggacacctacctgcaccgggtggcccgggcgggtcgctttggcaccaaaggcctagccatcacttttgtgtctgacgagaatgatgccaaaatcctcaatgacgtccaggaccggtttgaagttaatgtggcagaacttccagaggaaatcgacatctccacatacatcgagcagagccggtaaccaccacgtgccagagccgcccacccggagccgcccgcatgcagcttcacctcccctttccaggcgccactgttgagaagctagagattgtatgagaataaacttgttattatggaaaaaaaaaaaaaaaaaaaaaaaaaaaaaaaaaaaaaaaaaaaaaa

SEQ ID NO: 142 - DNA, 2915 bp, Homo sapiens
gcgactcgcttctttcggttctacctgggagaatccaccgccatccgccaccatggtgaacttcacggtagaccagatccgcgccatcatggacaagaaggccaacatccgcaacatgtctgtcatcgcccacgtggaccatggcaagtccacgctgacagactccctggtgtgcaaggcgggcatcatcgcctcggcccgggccggggagacacgcttcactgatacccggaaggacgagcaggagcgttgcatcaccatcaagtcaactgccatctccctcttctacgagctctcggagaatgacttgaacttcatcaagcagagcaaggacggtgccggcttcctcatcaacctcattgactcccccgggcatgtcgacttctcctcggaggtgactgctgccctccgagtcaccgatggcgcattggtggtggtggactgcgtgtcaggcgtgtgcgtgcagacggagacagtgctgcggcaggccattgccgagcgcatcaagcctgtgctgatgatgaacaagatggaccgcgccctgctggagctgcagctggagcccgaggagctctaccagactttccagcgcatcgtggagaacgtgaacgtcatcatctccacctacggcgagggcgagagcggccccatgggcaacatcatgatcgatcctgtcctcggtaccgtgggctttgggtctggcctccacgggtgggccttcaccctgaagcagtttgccgagatgtatgtggccaagttcgccgccaagggggagggccagttggggcctgccgagcgggccaagaaagtagaggacatgatgaagaagctgtggggtgacaggtactttgacccagccaacggcaagttcagcaagtcagccaccagccccgaagggaagaagctgccacgcaccttctgccagctgatcctggaccccatcttcaaggtgtttgatgcgatcatgaatttcaagaaagaggagacagcaaaactgatagagaaactggacatcaaactggacagcgaggacaaggacaaagaaggcaaacccctgctgaaggctgtgatgcgccgctggctgcctgccggagacgccttgttgcagatgatcaccatccacctgccctcccctgtgacggcccagaagtaccgctgcgagctcctgtacgaggggcccccggacgacgaggctgccatgggcattaaaagctgtgaccccaaaggccctcttatgatgtatatttccaaaatggtgccaacctccgacaaaggtcggttctacgcctttggacgagtcttctcggggctggtctccactggcctgaaggtcaggatcatggggcccaactatacccctgggaagaaggaggacctctacctgaagccaatccagagaacaatcttgatgatgggccgctacgtggagcccatcgaggatgtgccttgtgggaacattgtgggcctcgtgggcgtggaccagttcctggtgaagacgggcaccatcaccaccttcgagcacgcgcacaacatgcgggtgatgaagttcagcgtcagccctgttgtcagagtggccgtggaggccaagaacccggctgacctgcccaagctggtggaggggctgaagcggctggccaagtccgaccccatggtgcagtgcatcatcgaggagtcgggagagcacatcatcgcgggcgccggcgagctgcacctggagatctgcctgaaggacctggaggaggaccacgcctgcatccccatcaagaaatctgacccggtcgtctcgtaccgcgagacggtcagtgaagagtcgaacgtgctctgcctctccaagtcccccaacaagcacaaccggctgtacatgaaggcgcggcccttccccgacggcctggccgaggacatcgataaaggcgaggtgtccgcccgtcaggagctcaagcagcgggcgcgctacctggccgagaagtacgagtgggacgtggctgaggcccgcaagatctggtgctttgggcccgacggcaccggccccaacatcctcaccgacatcaccaagggtgtgcagtacctcaacgagatcaaggacagtgtggtggccggcttccagtgggccaccaaggagggcgcactgtgtgaggagaacatgcggggtgtgcgcttcgacgtccacgacgtcaccctgcacgccgacgccatccaccgcggagggggccagatcatccccacagcacggcgctgcctctacgccagtgtgctgaccgcccagccacgcctcatggagcccatctaccttgtggagatccagtgtccagagcaggtggtcggtggcatctacggggttttgaacaggaagcggggccacgtgttcgaggagtcccaggtggccggcacccccatgtttgtggtcaaggcctatctgcccgtcaacgagtcctttggcttcaccgctgacctgaggtccaacacgggcggccaggcgttcccccagtgtgtgtttgaccactggcagatcctgcccggagaccccttcgacaacagcagccgccccagccaggtggtggcggagacccgcaagcgcaagggcctgaaagaaggcatccctgccctggacaacttcctggacaaattgtaggcggcccttcctgcagcgcctgccgccccggggactcgcagcacccacagcaccacgtcctcgaattctcagacgacacctggagactgtcccgacacagcgacgctcccctgagaggtttctggggcccgctgcgtgccatcactcaaccataacactttttccatttcttcagagggaaactcagatgtccaaactaattttaacaaacgcattaagaggtttatttgggtacatggcccgcagtggcttttgccccagaaaggggaaaggaacacgcgggtag

SEQ ID NO: 143 - DNA, 3394 bp, Homo sapiens
gttggcctcgggctgaggtgcaaggaccaggactagggcgagggcagcggtccaagaaatagaaaacaatgactgggagagcccgagccagagccagaggaagggcccgcggtcaggagacagcgcagctggtgggctccactgccagtcagcaacctggttatattcagcctaggcctcagccgccaccagcagagggggaattatttggccgtggacggcagagaggaacagcaggaggaacagccaagtcacaaggactccagatatctgctggatttcaggagttatcgttagcagagagaggaggtcgtcgtagagattttcatgatcttggtgtgaatacaaggcagaacctagaccatgttaaagaatcaaaaacaggttcttcaggcattatagtaaggttaagcactaaccatttccggctgacatcccgtccccagtgggccttatatcagtatcacattgactataacccactgatggaagccagaagactccgttcagctcttctttttcaacacgaagatctaattggaaagtgtcatgcttttgatggaacgatattatttttacctaaaagactacagcaaaaggttactgaagtttttagtaagacccggaatggagaggatgtgaggataacgatcactttaacaaatgaacttccacctacatcaccaacttgtttgcagttctataatattattttcaggaggcttttgaaaatcatgaatttgcaacaaattggacgaaattattataacccaaatgacccaattgatattccaagtcacaggttggtgatttggcctggcttcactacttccatccttcagtatgaaaacagcatcatgctctgcactgacgttagccataaagtccttcgaagtgagactgttttggatttcatgttcaacttttatcatcagacagaagaacataaatttcaagaacaagtttccaaagaactaataggtttagttgttcttaccaagtataacaataagacatacagagtggatgatattgactgggaccagaatcccaagagcacctttaagaaagccgacggctctgaagtcagcttcttagaatactacaggaagcaatacaaccaagagatcaccgacttgaagcagcctgtcttggtcagccagcccaagagaaggcggggccctggggggacactgccagggcctgccatgctcattcctgagctctgctatcttacaggtctaactgataaaatgcgtaatgattttaacgtgatgaaagacttagccgttcatacaagactaactccagagcaaaggcagcgtgaagtgggacgactcattgattacattcataaaaacgataatgttcaaagggagcttcgagactggggtttgagctttgattccaacttactgtccttctcaggaagaattttgcaaacagaaaagattcaccaaggtggaaaaacatttgattacaatccacaatttgcagattggtccaaagaaacaagaggtgcaccattaattagtgttaatccactagataactggctgttgatctatacgcgaagaaattatgaagcagccaattcattgatacaaaatctatttaaagttacaccagccatgggcatgcaaatgaaaaaagcaataatgattgaagtggatgacagaactgaagcctacttaagagtcttacagcaaaaggtcacagcagacacccagatagttgtctgtctgttgtcaagtaatcggaaggacaaatacgatgctattaaaaaatacccgtgtacagattgccctaccccaagtcagtgtgtggtggcccgaaccttaggcaaacagcaaactgtcatggccattgctacaaagattgccctacagatgaactgcaagatgggaggagagctctggagggtggacatccccctgaagctcgtgatgatcgttggcatcgattgttaccatgacatgacagctgggcggaggtcaatcgcaggatttgttgccagcatcaatgaagggatgacccgctggttctcacgctgcatatttcaggatagaggacaggagctggtagatgggctcaaagtctgcctgcaagcggctctgagggcttggaatagctgcaatgagtacatgcccagccggatcatcgtgtaccgcgatggcgtaggagacggccagctgaaaacactggtgaactacgaagtgccacagtttttggattgtctaaaatccattggtagaggttacaaccctagactaacggtaattgtggtgaagaaaagagtgaacaccagattttttgctcagtctggaggaagacttcagaatccacttcctggaacagttattgatgtagaggttaccagaccagaatggtatgacttttttatcgtgagccaggctgtgagaagtggtagtgtttctcccacacattacaatgtcatctatgacaacagcggcctgaagccagaccacatacagcgcttgacctacaagctgtgccacatctattacaactggccaggtgtcattcgtgttcctgctccttgccagtacgcccacaagctggcttttcttgttggccagagtattcacagagagccaaatctgtcactgtcaaaccgcctttactacctctaacctgcagaagacgatgcagccgcttttctttttgaaatgactttgggatttttttaagcttttatttactttttttttaactgttatctttctggatgaaacttgggaaggggattaggagatctagcattttatttctagcattgctattcaccggcttccttattttatacgtaaaaattaagattttatattttatcttcttgtttctcatagatattttgtgagcatttttttgtttattttgaagaaatgtggataagatacttggtagtataaaacagactctctgagagtatttgaaatgtgtttggagatttacttaaacgtactttcaggagtgagcaagtcctacttataaacctatattaactttatttttgagatacctgttttgaatttaaaggagataagaggcgtaaagtaggatgctcactacaaccataggtggggtttcagctcatatcttaaagataaaaggtactattatataacctatacacaagatacaggagaaaatatgcttgatttttatttggcaggggggctaggttgtatgggagtaaaaaaaacattgaaaatttttaaattgtccaaagaaacattttaagactctttaacaaaaaaggccatgagtaaatctctatattaacattactatttattttgttttggaactgggacatgattctatttgttataaaataaaattgatgtgattgtcaaaaaaaaaaaaaaaa

SEQ ID NO: 144 - DNA, 1895 bp, Homo sapiens
ccgccgccgccgccgccggctcggtcccgcgcccgccatggcccgcctgacggagagcgaggcgcgccggcagcagcagcagctcctgcagccgcggccctcgcccgtgggcagcagcgggcccgagccccccggggggcagcccgacggcatgaaggacctggacgccatcaaactcttcgtgggccagatcccccggcacctggacgagaaggacctcaagccgctcttcgagcagttcggccgcatctacgagctcacggtgctcaaagacccctacacggggatgcacaaaggctgtgccttcctcacctactgtgccagggattccgccatcaaagctcagactgccctgcacgagcagaagaccttgcccggaatggcgcggccaatccaggtgaagcctgcggacagtgaaagccgcggaggtagggaccggaagctgttcgtggggatgctgaacaagcagcagtcggaggaggacgtgctgcggctgttccagcccttcggggtcattgacgagtgcaccgtgctccgggggcctgacggcagcagcaaaggctgtgctttcgtgaagttctcctcccacacggaggcgcaggcggccatccacgccttgcatgggagccagaccatgccgggagcctcctccagcctggtggtcaagttcgccgacacggacaaggagcggacgctccggcgcatgcagcagatggtgggccagctgggcatcctgacgccgtccctcacattgcccttcagcccctacagtgcctacgcccaggctctcatgcaacagcagacaacagtcctgtccacctcgggcagctacctgagtcccggcgtggccttctcaccctgtcacatccagcagataggcgccgtcagcctcaacgggctgcctgccacacccatcgctcctgcctctgggctgcactcacccccgctgctgggcaccaccgctgtgcctggcctcgtggctcccatcaccaatggctttgcaggtgtcgtgccctttccaggtgggcaccctgccctggaaaccgtctatgccaatggccttgtgccctacccagctcagagcccgactgtggccgagacactgcatcctgccttctccggagtccagcagtacacagccatgtaccccaccgcggccatcacgcccatcgcgcacagcgtcccccagccgccgcccctcctgcagcagcagcagcgagaaggtcccgagggctgtaacctgtttatctaccacctcccccaggagtttggagacacggagctgacgcagatgttcctacccttcggcaatatcatttcctccaaggtgtttatggatcgagctaccaaccagagcaagtgtttcggcttcgtgagctttgataacccggccagcgcccaggcagccatccaggccatgaacggcttccagatcggcatgaagaggctcaaagtccagctgaagcggcccaaagacccgggacacccctactgaccgcgcccacagccgccctgaggctgtaggcatggcccagacctgcgtgatttgtacaatgtactttatttctgctacgagtaatttcatgaagtttcaacttgcaaactgacttttgggacaaaccaacacacacacagaagagaaagcaaagaacttggaactttgggttgactcggtttgagttttgtgtcaaagaagatttcccgcggctgaagaggttggtgttcctgttacgtgtttcaggtgagaagcagcaaagcgtcttaatgttcaaaacgcctctctttggtctggagaaaaaaaaaaaaaaaaaaaaaacaactaaaaatttatttaataaaagttttacttgctaaaaaaaaaaaaaaaaaaaaaaaaaaaaaaaaaaaaaaaaaaa

SEQ ID NO: 145 - DNA, 2265 bp, Homo sapiens
gtacgacatggcgcgcgagctgcgggcgctgctgctgtggggccgccgcctgcggcctttgctgcgggcgccggcgctggcggccgtgccgggaggaaaaccaattctgtgtcctcggaggaccacagcccagttgggccccaggcgaaacccagcctggagcttgcaggcaggacgactgttcagcacgcagaccgccgaggacaaggaggaacccctgcactcgattatcagcagcacagagagcgtgcagggttccacttccaaacatgagttccaggccgagacaaagaagcttttggacattgttgcccggtccctgtactcagaaaaagaggtgtttatacgggagctgatctccaatgccagcgatgccttggaaaaactgcgtcacaaactggtgtctgacggccaagcactgccagaaatggagattcacttgcagaccaatgccgagaaaggcaccatcaccatccaggatactggtatcgggatgacacaggaagagctggtgtccaacctggggacgattgccagatcggggtcaaaggccttcctggatgctctgcagaaccaggctgaggccagcagcaagatcatcggccagtttggagtgggtttctactcagctttcatggtggctgacagagtggaggtctattcccgctcggcagccccggggagcctgggttaccagtggctttcagatggttctggagtgtttgaaatcgccgaagcttcgggagttagaaccgggacaaaaatcatcatccacctgaaatccgactgcaaggagttttccagcgaggcccgggtgcgagatgtggtaacgaagtacagcaacttcgtcagcttccccttgtacttgaatggaaggcggatgaacaccttgcaggccatctggatgatggaccccaaggatgtccgtgagtggcaacatgaggagttctaccgctacgtcgcgcaggctcacgacaagccccgctacaccctgcactataagacggacgcaccgctcaacatccgcagcatcttctacgtgcccgacatgaaaccgtccatgtttgatgtgagccgggagctgggctccagcgttgcactgtacagccgcaaagtcctcatccagaccaaggccacggacatcctgcccaagtggctgcgcttcatccgaggtgtggtggacagtgaggacattcccctgaacctcagccgggagctgctgcaggagagcgcactcatcaggaaactccgggacgttttacagcagaggctgatcaaattcttcattgaccagagtaaaaaagatgctgagaagtatgcaaagttttttgaagattacggcctgttcatgcgggagggcattgtgaccgccaccgagcaggaggtcaaggaggacatagcaaagctgctgcgctacgagtcctcggcgctgccctccgggcagctaaccagcctctcagaatacgccagccgcatgcgggccggcacccgcaacatctactacctgtgcgcccccaaccgtcacctggcagagcactcaccctactatgaggccatgaagaagaaagacacagaggttctcttctgctttgagcagtttgatgagctcaccctgctgcaccttcgtgagtttgacaagaagaagctgatctctgtggagacggacatagtcgtggatcactacaaggaggagaagtttgaggacaggtccccagccgccgagtgcctatcagagaaggagacggaggagctcatggcctggatgagaaatgtgctggggtcgcgtgtcaccaacgtgaaggtgaccctccgactggacacccaccctgccatggtcaccgtgctggagatgggggctgcccgccacttcctgcgcatgcagcagctggccaagacccaggaggagcgcgcacagctcctgcagcccacgctggagatcaaccccaggcacgcgctcatcaagaagctgaatcagctgcgcgcaagcgagcctggcctggctcagctgctggtggatcagatatacgagaacgccatgattgctgctggacttgttgacgaccctagggccatggtgggccgcttgaatgagctgcttgtcaaggccctggagcgacactgacagccagggggccagaaggactgacaccacagatgacagccccacctccttgagctttatttacctaaatttaaaggtatttcttaaaaaaaaaaaaaaaaaaaaaaaaaaaaaaaaaaaaaaaaaaaaaaaaaaaaaaaaaa

SEQ ID NO: 146 - DNA, 2918 bp, Homo sapiens
cgaggttagggcccgcgttgcgacgtggtgcagcgcatattttcacaagtgggtctcccttgtccgggactatggccaccgactcgtgggccctggcggtggacgagcaggaagcggctgtcaagtcgatgaccaatttgcagatcaaggaagagaaagtcaaagcagataccaatggtattatcaaaaccagtaccactgccgagaaaacagatgaagaggagaaagaggacagagctgcccagtccttactcaacaagctgatcagaagcaaccttgttgataacacaaaccaagtggaagtcctgcaacgggatccaaactcccctctgtactcggtgaagtcgtttgaagagcttcggctgaaaccacagcttctccagggagtctatgccatgggcttcaatcgaccctccaagatacaagagaacgcattacccatgatgcttgctgaacccccacagaatctgattgcccagtctcagtctggcactggtaaaacagctgcctttgtcttagccatgctcagccgagtggagccatcagacagatacccccagtgtctgtgcctctccccaacatatgagctggcgcttcaaacaggaaaagtgattgagcagatgggcaaattttacccagaactgaagcttgcctatgccgttcgaggcaataaattggaaagaggccagaagatcagtgagcagattgtcattggcacccctgggaccgtgctggactggtgctccaagctcaagttcattgatcccaagaaaatcaaggtgtttgttctggatgaggctgatgtcatgatagccactcagggccaccaagatcagagcatccgcatccagaggatgctgcccaggaactgccagatgctgcttttctccgccacctttgaagactctgtgtggaagtttgcccagaaagtggtcccagacccaaatgttatcaaactgaagcgtgaggaagagaccctggataccatcaagcagtactatgtcctgtgcagcagcagagacgagaagttccaggccttgtgtaacctctacggggccatcaccattgctcaagccatgatcttctgccatactcgcaaaacagctagttggctggcagcagagctctcaaaagaaggccaccaggtggctctgctgagtggggagatgatggtggagcagagggctgcggtgattgagcgcttccgagagggcaaagagaaggttttggtgaccaccaacgtgtgtgcccgcggcattgatgttgaacaagtgtctgtcgtcatcaactttgatcttcccgtggacaaggacgggaatcctgacaatgagacctacctgcaccggatcgggcgcacgggccgctttggcaagaggggcctggcagtgaacatggtggacagcaagcacagcatgaacatcctgaacagaatccaggagcattttaataagaagatagaaagattggacacagatgatttggacgagattgagaaaatagccaactgagaagctccaccagccactgatgccagccctggcactgcccctgcacaggagacaagtgcatttagggcacaggccccgacatcaccccaaggacaacggcagaagtagagagaaactacctacctcacttcaaattatgtttggacttgacaaaaataggtgcaaatgatggggggcaatagaagaaaaaatttgcattttggaaaattgggtcctttccccacttttttaaagccacattcccccatctttataataatctggtcacagtggtagtcgctggccccaggaccccctcctgattttggctaggcatcgtggaaccagctccagcccctgaagaaacgatagatgtgcaggttgtgcggaagaggctgagtggaaaatggtgtgagccccaccgctgtgcatcgaatgagggaagtggcagcagagaggccagagctgccccctctctgtctcttcaatggacccttcacaagtgtttctcctgcccttggggctgtcttccttctcctgaaatccagagactttcttgctcatcccttctccctttcacttctgttctctgctgcagaaagcagacttgcatatccctgatgagcagctcggctacttttgtaaacttcagatttggagagaaacacgaaagtctgaatcctgaccccttgagagagagtgatctggcgagggccgatgaaggggctgggcctggtcttgccttctcttctctcggttgctccctctgcctaggcccctggtactcagtcacggcagccaggagaccccaggtgagtttctgagcgcatacgtagttggttcttacccccaggtgtcacacggggccgagagctgagcaagaatttggaatggaagttatgaccaagggaattatgctgttcatttataatagtggacattatggagagctctgattcctacataatatgaataaggatggataggccgggcgtggtggctcatgcctataatcccagcacgttgggaggctgaggcgggcggatcggttgagctcaggcgttcgggaccagcctggccaacatgatgaaaccccgtctctaccaaaaatagaaaaaaatatagccgggcctggtggcgcacgcctgtagtcccagctactcgggaggctgaggtaggaggatcgcttgagcctgggtagaggctgctgtgagctgaaatggcgccactgcactccagcctgggtaacagagcgagaccccgactcaataaataaataaggatggataaattgtagcgtatgcaccattcattatgctaagacattttaaagtaattatgagaaacgctctactaatgatttgtttttatttgtatttttctgcttattagacaaatatatactcattttaaaaaaaaaaaaaaaaaaaa

SEQ ID NO: 147 - DNA, 2918 bp, Homo sapiens; identical to SEQ ID NO: 146

SEQ ID NO: 148 - DNA, 3818 bp, Homo sapiens
ggatgatggagacagagcgacttgtgctaccccctccagatcccctggacctaccccttcgggccgtggagctcggatgcacggggcactgggagctgctgaacttgcctggagctccagagagtagccttccccatggcctccctccttgtgccccagatctgcagcaagaagcagaacagttgtttctgtcatccccagcctggctgcctctgcatggtgtggagcactcagcccgaaaatggcagaggaagacggatccctggtctcttttggctgtgctgggagccccagtcccatccgacctacaggcccaaagacacccaaccacaggccagatactgggttacaaagaggtcttgctggagaacacaaatctctcggctacaacctccttgtctcttcgccggcctccagggccagcctcccagtccttatggggaaatccaactcggtatcccttctggccaggggggatggatgaacccaccataacagatctgaacacacgggaggaggctgaggaggagatagactttgagaaagatcttcttactattccacctggtttcaagaaaggcatggactttgcaccaaaagattgtccaactccagctcctggactactaagccttagctgtctgttggagcctctggatttgggtgggggtgacgaggatgagaatgaggcagtgggacagccaggaggtcccagaggggacactgtttcagcctctccctgcagtgctcccctggcccgagcaagcagcttggaagacctagtgttgaaggaagcgtccacagctgtatccaccccagaggccccagagcctccatctcaggagcagtgggccatccctgtggacgccacctcccctgttggtgatttctatcgcctcattccccagccagccttccagtgggcatttgagccagatgtgtttcagaaacaggccatcctgcacttggaacggcatgactctgtctttgtcgcagctcacacatctgcaggaaaaacagttgtggctgaatatgccattgccctggcccagaaacacatgacacgcaccatctacacttcgcccatcaaggccctgagcaaccagaagttccgggacttccgaaacacattcggggatgtggggctgctcaccggggatgtacagctgcatccggaggcctcctgcctcatcatgaccacagagatccttcgctccatgctgtacagtggctcagatgttattcgggacctggagtgggtcatctttgatgaggttcactatatcaacgatgtcgagcgtggggtcgtgtgggaggaggtgcttatcatgctacctgaccacgtttctatcatccttctgagtgccaccgtccccaacgcccttgagtttgctgactggattgggcggctgaagcgtcgtcagatctatgtgattagcactgtaacccgccccgtgcccctggagcactatcttttcacagggaacagctccaagacccagggggagctctttttgttgctggactcccgaggagccttccatacaaaagggtactatgcagctgtggaggccaagaaggagagaatgagcaaacacgcccagacctttggggccaagcagcccacacatcaggggggccctgcacaggaccgcggagtgtacctgtccctcctggcctccctccgcacacgtgcccagttgcccgtggtggtgttcaccttctcccggggccgctgtgatgagcaggcctcaggcctcacctcccttgacctcaccaccagttcggagaagagcgagatccacctcttcctgcagcgctgccttgctcgcctccgtggctctgaccgccagctgccccaggtcctgcacatgtcagagctcctgaatcgcggcctgggtgtgcaccatagcggcatcctgcccatcctcaaggagatcgtggagatgctcttcagccgtggcctggtcaaggtcttgtttgccacagagacctttgccatgggagtaaacatgcctgctcgtacagtagtgtttgactccatgcgcaaacacgatggctccaccttccgggacctgctccctggggagtatgtgcagatggcaggccgggcagggcggaggggcctggaccccacaggcaccgttatcctgctctgcaagggccgagtgcccgagatggcagacctgcaccgcatgatgatggggaagccgtcccagctgcagtcccagttccgcctcacgtacactatgatcctcaacttgctgcgagtggatgccctcagggtggaggacatgatgaagaggagcttctctgagtttccctcccgcaaagacagcaaggcccatgaacaggccctggctgaactgaccaagaggctgggagctttggaggagcctgacatgactggccaactggtcgacctgcctgaatattacagctggggggaggaactgacagagacccagcacatgatccagcgacgcatcatggagtctgtgaacgggctgaagtctctctcagcaggaagggtggtggttgtgaagaatcaggagcatcacaacgcattgggagtgatcctacaggtctcctcgaactccaccagcagagtattcacaaccctggtcttgtgtgataagcccttgtcccaggacccacaggacagggggccagccactgcagaggtgccctatccagatgacctcgtgggattcaagctgttcctgcctgaagggccttgtgaccacaccgtggtcaagctccagccaggagatatggctgccatcaccaccaaggtgctccgggtgaatggggagaagatcttggaggacttcagcaagaggcagcagccaaaattcaagaaggatcctccccttgcagccgtgaccactgctgtccaggaactgctgcgtctggctcaggcccacccagccggacctcccaccctcgaccctgtcaatgacctgcagctcaaagatatgtcagttgtagagggtgggctccgggcccggaagctggaggagctgatccagggggctcagtgtgtacacagcccccgttttcctgcccagtacctgaagctgcgggagcgaatgcagatacagaaggagatggagcggctgcgcttcctactgtcggatcagtcattgctgctgcttcctgagtaccatcagcgagtagaggtgctccgaaccctgggttacgtggacgaggtgggcactgtgaagctggcagggcgggtggcttgtgccatgagcagccatgagttgctcctcactgagctcatgtttgacaatgcactgagcaccctgcggcctgaggagattgctgccttgctctctggcctggtctgccagagccctggggacgctggggatcagctcccaaacaccctcaagcagggaatagaacgtgtccgggctgtggccaagcggattggtgaggtccaggtggcttgtggcctgaaccagacggtggaggaatttgtgggggagctgaattttgggctggttgaggttgtatatgagtgggcccggggcatgcccttctccgagttggcagggctctcagggacccctgagggcctggtggtccgctgcattcagcgcctggctgagatgtgtcgctcactgcggggggcagcccgcctggtaggagagcctgtgctgggtgccaagatggagacagcggctaccttgctacggcgggacatcgtatttgcggccagcctctacacccagtgaatgccccatgtaaaaacatgatgataaaacagcaaaaaaaaaaaaaaaaaaaaaaaaaaaaaaaaaaaaaaaaaa

SEQ ID NO: 149 - DNA, 3119 bp, Homo sapiens
ccgtcctggtgccttactgtgcatacagttctactcgtctcagaaacgtatgtcaaacgaggatacagtgtctggaactattggttctaagatataagtggaatgagcctggatcaggagaagtatgctgagctagagttgaaggaagcttctctttctaacaagagaaagcagagttaaattatggcagagacaagtctgttagaggctggggcctctgcagcctctacagctgcggctttggagaacttacaggtggaggcgagctgctctgtgtgcctggagtatctgaaggaacctgtcatcattgagtgtgggcacaacttctgcaaagcttgcatcacccgctggtgggaggacctagagagggacttcccttgtcctgtctgtcgaaagacatcccgctaccgcagtctccgacctaatcggcaactaggcagtatggtggaaattgccaagcagctccaggccgtcaagcggaagatccgggatgagagcctctgcccccaacaccatgaggccctcagccttttctgttatgaggaccaggaggctgtatgcttgatatgtgcaatttcccacacccaccgggcccacaccgttgtgccactggacgacgctacacaggagtacaaggaaaaactgcagaagtgtctggagcccctggaacagaagctgcaggagatcactcgctgcaagtcctctgaggagaagaagcctggtgagctcaagagactagtggaaagtcgccgacagcagatcttgagggagtttgaagagcttcataggcggctggatgaagagcagcaggtgttgctttcacgactggaagaagaggaacaggacattctgcagcgactccgagaaaatgctgctcaccttggggacaagcgccgggacctggcccacttggctgccgaggtggagggcaagtgcttacagtcaggcttcgagatgcttaaggatgtcaaaagtaccctggaaaaatgtgaaaaggtgaagaccatggaggtgacttcagtatccatagagctggaaaagaacttcagcaattttccccgacagtactttgccctaaggaaaatccttaaacagctaattgcggatgtgaccctggaccccgagacagctcatcctaacctagtcctgtcagaggatcgtaagagcgtcaagttcgtggagacaagactccgggatctccctgacacaccaaggcgtttcaccttctacccttgcgtcctggctactgagggtttcacctcaggtcgacactactgggaggtggaggtgggcgacaagacccactgggcagtgggtgtatgccgggactccgtgagccgaaagggcgagttgactccactccctgagactggctactggcgggtgcggctatggaatggggacaaatatgcagccaccaccacaccttttacccctttgcacatcaaggtgaaacccaagcgggtaggcatattcctagactatgaggccggcacactgtctttctacaatgtcacagaccgctctcatatctacaccttcactgatacttttactgagaaactttggcccctcttctacccaggcatccgggctggacggaagaatgctgcaccacttaccatcaggcccccaacagattgggagtgacaggttgggatgtgggaatgactggggtgaggcagggtcaagtgctacgggcctccttcccgtgtcctgctggaacgtcttcgtgtccacctgggtccagtcctgaatcatcttggagaaacaccttggtttctaggatggttttgtgtggagggggaggtaggactgggctggatgagagagcacagctgtgacttcctcctaactgtcagggtggggagctggttcccagaggattgtctaccctgaagtccatcaggttttctgttgcacaaggacgggtcaggaaggaaggagaggcttttccagaaacaaaaaatctgtgagggtctgacttgctcaaaccagaggaggaaacagaaacccctgcacatctttttagggggttctttgacccaggatagtcttgcttcttgaggtagatcacaggggtctgtgtacctctgaattcatgagagatgaacgacagatgctctcatgggtctagatattgaggagtttttctgagggcagagattggacatcaacaaggctagaagggtcagggaagtgggctaaaggaacagattcctagagattaatgaagaggagggaggtttctttggtcttctattccaagggtaaggttgcgattatgggtaagattggccagaggtaggaatgtggggagaaggagaggctgaaaagaaagcagaggagaacccaggtccctgcctcagccttcagcagagttggcttattgcctgcctctataccaataagtcagtcaccttgctcctctccagaggcaaagtggaagagatcctgcaagacacatctatcctttcacagtgttcccaagggaacttggaaaggagagtcaggtattagaggaaagagaagggtatttgtatacaaagccctggccttaaagaatgttacttagtagctactcccaaattgtcagccttcttacctggccaaggtgtccaagccagaaaggaaaaaaggttatggagtctttctcaccctaaggacagggtggaagagggtggtatatagggaagggccagataggcaacttcatttggcttgtgtgcatctggcctggaactggtgttaagccaggcttttgcttgtttgttgccatccctcaccctttgccatttcccttttcagagaatgtaaatgattttcatgttaggccaaaataaacaacttatagggtatatatgttgtcataaaaggtaaaagtgatgcatgccaaaccaaactaaaccaatttggattatctgctattcgggtaatcttcacagaaatgactgagagaagaatctgcagtttactgagggcatttcagttcctcctaccacctcaacaggactttgtccagactctcctcctcttacctttgtgccttgactgtggttctttgtggcaagatactttggttggttaaaataatatggaacaaaaaaaaaaaaaaaaaa

SEQ ID NO: 150 - DNA, 1760 bp, Homo sapiens
cgaagaagcatcgttaaagtctctcttcaccctgccgtcatgtctaagtcagagtctcctaaagagcccgaacagctgaggaagctcttcattggagggttgagctttgaaacaactgatgagagcctgaggagccattttgagcaatggggaacgctcacggactgtgtggtaatgagagatccaaacaccaagcgctccaggggctttgggtttgtcacatatgccactgtggaggaggtggatgcagctatgaatgcaaggccacacaaggtggatggaagagttgtggaaccaaagagagctgtctccagagaagattctcaaagaccaggtgcccacttaactgtgaaaaagatatttgttggtggcattaaagaagacactgaagaacatcacctaagagattattttgaacagtatggaaaaattgaagtgattgaaatcatgactgaccgaggcagtggcaagaaaaggggctttgcctttgtaacctttgacgaccatgactccgtggataagattgtcattcagaaataccatactgtgaatggccacaactgtgaagttagaaaagccctgtcaaagcaagagatggctagtgcttcatccagccaaagaggtcgaagtggttctggaaactttggtggtggtcgtggaggtggtttcggtgggaatgacaacttcggtcgtggaggaaacttcagtggtcgtggtggctttggtggcagccgtggtggtggtggatatggtggcagtggggatggctataatggatttggtaatgatggaagcaattttggaggtggtggaagctacaatgattttgggaattacaacaatcagtcttcaaattttggacccatgaagggaggaaattttggaggcagaagctctggcccctatggcggtggaggccaatactttgcaaaaccacgaaaccaaggtggctatggcggttccagcagcagcagtagctatggcagtggcagaagattttaattaggaaacaaagcttagcaggagaggagagccagagaagtgacagggaagctacaggttacaacagatttgtgaactcagccaagcacagtggtggcagggcctagctgctacaaagaagacatgttttagacaaatactcatgtgtatgggcaaaaaactcgaggactgtatttgtgactaattgtataacaggttattttagtttctgttctgtggaaagtgtaaagcattccaacaaagggttttaatgtagatttttttttttgcaccccatgctgttgattgctaaatgtaacagtctgatcgtgacgctgaataaatgtcttttttttaatgtgctgtgtaaagttagtctactcttaagccatcttggtaaatttccccaacagtgtgaagttagaattccttcagggtgatgccaggttctatttggaatttatatacaacctgcttgggtggagaagccattgtcttcggaaaccttggtgtagttgaactgatagttactgttgtgacctgaagttcaccattaaaagggattacccaagcaaaatcatggaatggttataaaagtgattgttggcacatcctatgcaatatatctaaattgaataatggtaccagataaaattatagatgggaatgaagcttgtgtatccattatcatgtgtaatcaataaacgatttaattctcttgaaaaaaaaaaaaaaaaaaaaaaaaaaaaaaaaaaaaaaaaaaaaaaaaaaaaaaaaaa

SEQ ID NO: 151 - DNA, 1752 bp, Homo sapiens
cctttctgcccgtggacgccgccgaagaagcatcgttaaagtctctcttcaccctgccgtcatgtctaagtcagagtctcctaaagagcccgaacagctgaggaagctcttcattggagggttgagctttgaaacaactgatgagagcctgaggagccattttgagcaatggggaacgctcacggactgtgtggtaatgagagatccaaacaccaagcgctccaggggctttgggtttgtcacatatgccactgtggaggaggtggatgcagctatgaatgcaaggccacacaaggtggatggaagagttgtggaaccaaagagagctgtctccagagaagattctcaaagaccaggtgcccacttaactgtgaaaaagatatttgttggtggcattaaagaagacactgaagaacatcacctaagagattattttgaacagtatggaaaaattgaagtgattgaaatcatgactgaccgaggcagtggcaagaaaaggggctttgcctttgtaacctttgacgaccatgactccgtggataagattgtcattcagaaataccatactgtgaatggccacaactgtgaagttagaaaagccctgtcaaagcaagagatggctagtgcttcatccagccaaagaggtcgaagtggttctggaaactttggtggtggtcgtggaggtggtttcggtgggaatgacaacttcggtcgtggaggaaacttcagtggtcgtggtggctttggtggcagccgtggtggtggtggatatggtggcagtggggatggctataatggatttggtaatgatggaagcaattttggaggtggtggaagctacaatgattttgggaattacaacaatcagtcttcaaattttggacccatgaagggaggaaattttggaggcagaagctctggcccctatggcggtggaggccaatactttgcaaaaccacgaaaccaaggtggctatggcggttccagcagcagcagtagctatggcagtggcagaagattttaattaggaaacaaagcttagcaggagaggagagccagagaagtgacagggaagctacaggttacaacagatttgtgaactcagccaagcacagtggtggcagggcctagctgctacaaagaagacatgttttagacaaatactcatgtgtatgggcaaaaaactcgaggactgtatttgtgactaattgtataacaggttattttagtttctgttctgtggaaagtgtaaagcattccaacaaagggttttaatgtagatttttttttttgcaccccatgctgttgattgctaaatgtaacagtctgatcgtgacgctgaataaatgtcttttttttaatgtgctgtgtaaagttagtctactcttaagccatcttggtaaatttccccaacagtgtgaagttagaattccttcagggtgatgccaggttctatttggaatttatatacaacctgcttgggtggagaagccattgtcttcggaaaccttggtgtagttgaactgatagttactgttgtgacctgaagttcaccattaaaagggattacccaagcaaaatcatggaatggttataaaagtgattgttggcacatcctatgcaatatatctaaattgaataatggtaccagataaaattatagatgggaatgaagcttgtgtatccattatcatgtgtaatcaataaacgatttaattctcttaaaaaaaaaaaaaaaaaaaaaaaaaaaaa

SEQ ID NO: 152 - DNA, 1702 bp, Homo sapiens
gtctctcttcaccctgccgtcatgtctaagtcagagtctcctaaagagcccgaacagctgaggaagctcttcattggagggttgagctttgaaacaactgatgagagcctgaggagccattttgagcaatggggaacgctcacggactgtgtggtaatgagagatccaaacaccaagcgctccaggggctttgggtttgtcacatatgccactgtggaggaggtggatgcagctatgaatgcaaggccacacaaggtggatggaagagttgtggaaccaaagagagctgtctccagagaagattctcaaagaccaggtgcccacttaactgtgaaaaagatatttgttggtggcattaaagaagacactgaagaacatcacctaagagattattttgaacagtatggaaaaattgaagtgattgaaatcatgactgaccgaggcagtggcaagaaaaggggctttgcctttgtaacctttgacgaccatgactccgtggataagattgtcattcagaaataccatactgtgaatggccacaactgtgaagttagaaaagccctgtcaaagcaagagatggctagtgcttcatccagccaaagaggtcgaagtggttctggaaactttggtggtggtcgtggaggtggtttcggtgggaatgacaacttcggtcgtggaggaaacttcagtggtcgtggtggctttggtggcagccgtggtggtggtggatatggtggcagtggggatggctataatggatttggtaatgatggaagcaattttggaggtggtggaagctacaatgattttgggaattacaacaatcagtcttcaaattttggacccatgaagggaggaaattttggaggcagaagctctggcccctatggcggtggaggccaatactttgcaaaaccacgaaaccaaggtggctatggcggttccagcagcagcagtagctatggcagtggcagaagattttaattaggaaacaaagcttagcaggagaggagagccagagaagtgacagggaagctacaggttacaacagatttgtgaactcagccaagcacagtggtggcagggcctagctgctacaaagaagacatgttttagacaaatactcatgtgtatgggcaaaaaactcgaggactgtatttgtgactaattgtataacaggttattttagtttctgttctgtggaaagtgtaaagcattccaacaaagggttttaatgtagatttttttttttgcaccccatgctgttgattgctaaatgtaacagtctgatcgtgacgctgaataaatgtcttttttttaatgtgctgtgtaaagttagtctactcttaagccatcttggtaaatttccccaacagtgtgaagttagaattccttcagggtgatgccaggttctatttggaatttatatacaacctgcttgggtggagaagccattgtcttcggaaaccttggtgtagttgaactgatagttactgttgtgacctgaagttcaccattaaaagggattacccaagcaaaatcatggaatggttataaaagtgattgttggcacatcctatgcaatatatctaaattgaataatggtaccagataaaattatagatgggaatgaagcttgtgtatccattatcatgtgtaatcaataaacgatttaattctcttgaaaaaaaaaaaaaaaaaa

SEQ ID NO: 153 - DNA, 1738 bp, Homo sapiens
ccacgcgtccgcgaagaagcatcgttaaagtctctcttcaccctgccgtcatgtctaagtcagagtctcctaaagagcccgaacagctgaggaagctcttcattggagggttgagctttgaaacaactgatgagagcctgaggagccattttgagcaatggggaacgctcacggactgtgtggtaatgagagatccaaacaccaagcgctccaggggctttgggtttgtcacatatgccactgtggaggaggtggatgcagctatgaatgcaaggccacacaaggtggatggaagagttgtggaaccaaagagagctgtctccagagaagattctcaaagaccaggtgcccacttaactgtgaaaaagatatttgttggtggcattaaagaagacactgaagaacatcacctaagagattattttgaacagtatggaaaaattgaagtgattgaaatcatgactgaccgaggcagtggcaagaaaaggggctttgcctttgtaacctttgacgaccatgactccgtggataagattgtcattcagaaataccatactgtgaatggccacaactgtgaagttagaaaagccctgtcaaagcaagagatggctagtgcttcatccagccaaagaggtcgaagtggttctggaaactttggtggtggtcgtggaggtggtttcggtgggaatgacaacttcggtcgtggaggaaacttcagtggtcgtggtggctttggtggcagccgtggtggtggtggatatggtggcagtggggatggctataatggatttggtaatgatggaagcaattttggaggtggtggaagctacaatgattttgggaattacaacaatcagtcttcaaattttggacccatgaagggaggaaattttggaggcagaagctctggcccctatggcggtggaggccaatactttgcaaaaccacgaaaccaaggtggctatggcggttccagcagcagcagtagctatggcagtggcagaagattttaattaggaaacaaagcttagcaggagaggagagccagagaagtgacagggaagctacaggttacaacagatttgtgaactcagccaagcacagtggtggcagggcctagctgctacaaagaagacatgttttagacaaatactcatgtgtatgggcaaaaaactcgaggactgtatttgtgactaattgtataacaggttattttagtttctgttctgtggaaagtgtaaagcattccaacaaagggttttaatgtagatttttttttttgcaccccatgctgttgattgctaaatgtaacagtctgatcgtgacgctgaataaatgtcttttttttaatgtgctgtgtaaagttagtctactcttaagccatcttggtaaatttccccaacagtgtgaagttagaattccttcagggtgatgccaggttctatttggaatttatatacaacctgcttgggtggagaagccattgtcttcggaaaccttggtgtagttgaactgatagttactgttgtgacctgaagttcaccattaaaagggattacccaagcaaaatcatggaatggttataaaagtgattgttggcacatcctatgcaatatatctaaattgaataatggtaccagataaaattatagatgggaatgaagcttgtgtatccattatcatgtgtaatcaataaacgatttaattctcttgaaaaaaaaaaaaaaaaaaaaaaaaa

SEQ ID NO: 154 - DNA, 3006 bp, Homo sapiens
aacatgagtggaagagcccgagtgaaggccagaggcatcgcccgcagccccagtgccacagaagtggggcgcatccaagcctcgccattgcctagatctgttgatcttagtaacaatgaagcatcctctagcaatggcttcttgggaacaagcaggatctcaaccaacgataaatatgggatatcttctggtgatgctggaagtaccttcatggaaagaggtgtgaaaaacaaacaggactttatggatttgagtatctgtaccagagaaaaattggcacatgtgagaaattgtaaaacaggttccagtggaatacctgtgaaactggttacaaacctctttaacttagattttccccaagactggcagctataccagtaccatgtgacatatattccagatttagcatctagaaggctgagaattgctttactttatagtcatagtgaactttccaacaaagcaaaagcattcgacggtgccatcctttttctgtcacaaaagctagaagaaaaggtcacagagttgtcaagtgaaactcaaagaggtgagactataaagatgactatcaccctgaagagggagctgccatcaagttctcccgtgtgcatccaggtcttcaatatcatcttcagaaagatcctcaaaaagttgtccatgtaccaaattggacggaacttctataatccttcagagccaatggaaattccccagcacaaattatccctttggcctgggtttgccatttctgtgtcatattttgaaaggaagctcctgtttagtgctgatgtgagttacaaagtcctccggaatgagacggttctggaattcatgactgctctctgtcaaagaactggcttgtcctgtttcacccagacgtgtgagaagcagctaatagggctcattgtccttacaagatacaataacagaacctactccattgatgacattgactggtcagtgaagcccacacacacctttcagaagcgggatggcaccgagatcacctatgtggattactacaagcagcagtatgatattactgtatcggacctgaatcagcccatgcttgttagtctgttaaagaagaagagaaatgacaacagtgaggctcagctcgcccacctgatacctgagctctgctttctaacagggctgactgaccaggcaacatctgatttccagctgatgaaggctgtggctgaaaagacacgtctcagtccttcaggccggcagcagcgcctggccaggcttgtggacaacatccagaggaataccaatgctcgctttgaactagagacctggggactgcattttggaagccagatatctctgactggccggattgtgccttcagaaaaaatattaatgcaagaccacatatgtcaacctgtgtctgctgctgactggtccaaggatattcgaacttgcaagattttaaatgcacagtctttgaatacctggttgattttatgtagcgacagaactgaatatgttgccgagagctttctgaactgcttgagaagagttgcaggttccatgggatttaatgtggactaccccaaaatcataaaagtacaagaaaatccagctgcatttgttagagctatacagcaatatgttgatcctgatgttcagctggtaatgtgcattctgccttctaatcagaagacctattatgattccattaaaaaatatttgagctcagactgcccagtcccaagccaatgtgtgcttgctcggaccttgaataaacagggcatgatgatgagtatcgccaccaagatcgctatgcagatgacttgcaagctcggaggcgagctgtgggctgtggaaatacctttaaagtccctgatggtggtcggtattgatgtctgtaaagatgcactcagcaaggacgtgatggttgttggatgcgtggcaagtgttaaccccagaatcaccaggtggttttcccgctgtatccttcagagaacaatgactgatgttgcagattgcttgaaagttttcatgactggagcactcaacaaatggtacaagtacaatcatgatttgccagcacggataattgtgtaccgtgctggtgtaggggatggtcagctgaaaacacttattgaatatgaagtcccacagctgctgagcagtgtggcagaatccagctcaaataccagctcaagactgtcggtgattgtggtcaggaagaagtgcatgccacgattctttaccgaaatgaaccgcactgtacagaaccccccacttggcactgttgtggattcagaagcaacacgtaacgaatggtatgacttttatctgatcagccaggtggcctgccggggaactgttagtcctacctactataatgtcatctatgatgacaacggcttgaagcccgaccatatgcagagacttacattcaaattgtgccacctgtactacaactggccgggcatagtcagtgtcccagcaccatgtcagtatgctcacaagctgacctttctggtggcacaaagcattcataaagaacccagtctggaattagccaaccatctcttctacctgtgatggcatgaactactggcatcactagatggacaatccaagaagaaattggtatactttgtgcaaatctgccataagctcaaggctgtgactggggaaaaagattgagcttagttttcatgtctaggaaaaaaagcaaaacaacttaatctgaaacagttttaaaaaatgtgtgttattttgttttaaagagttgtatgcttggggtaaattttcattgtcatatgtggaatttaaatataccatcatctacaaagaattccacagagttaaatatcttaagttaaacacttaaaataagtgtttgcgtgatattttgatgatagataaacagagtctaattcccaccccaaattttgctgaggttttcttaatgttgtagagcattttgtagagtggtttaaatagttgaaaataaagttcagaacatcaaaaaaaaaaaaaaaa

SEQ ID NO: 155 - DNA, 1400 bp, Homo sapiens
ggttttactggaagaggagctatacagatggtacttagaggatgtagggccctacgtattagggcttcttagttgtagcgaagagcaatggtctggtacgtttagctttttcacatttagttttgaattctgactctagaaatgtacaaccccatcttttgaattacaggttttaagatgttatttgctcttaatacgtcttaaggtaacagccttgatcactgcttttactttcgatgaaataacttaatgagctgtgaagaaaaaattatcagattttaagggagagaattttatgaaaatgtctttgaggttcctgtcacctttatgagaatgtcttcaaagtttccatcaccacctctaccaatttttcttccaccggagccagtggacttaggttccataacaagctcctcttgttcactgaatgagctagacaatatttcccaccttttaaggaaaatatcagctgatatcaatgaaattaaaggaatgaaagcagctattttgacagtggaagcaaatctttttgatctaaatgttagagtgtccaagaatgaagcaaaaatttcatctttggaggttaaaatgaatgaatattcaacaacatatgaatgcaacagacagtttgaagatcaagaagaagatactgaatcacagtcaagaactactgatgtaaaaataatcggcttccttagaaacgttgagaaaggaactcaacagaggcaattattatcccgactgcaaatcgacccagtaatggcagaaactctgcagatgagtcaagctgagatgagtgaactgagtgtggcacagaaaccagaaaaacttttggagcgctgcaagtactggcctgcttgtaaaaatggggatgagtgtgcctaccatcaccccatctcaccctgcaaagccttccccaattgtaaatttgctgaaaaatgtttgtttgttcacccaaattgtaaatatgatgcaaagtgtactaaaccagattgtcccttcactcatgtgagtagaagaattccagtactgtctccaaaaccagttgcaccaccagcaccaccttccagtagtcagctctgccgttacttccctgcttgtaagaagatggaatgtcccttctatcatccaaaacattgtaggtttaacactcaatgtacaagaccggactgcacattctaccatcccaccattaatgtcccaccacgacatgccttgaaatggattcgacctcaaaccagcgaatagcacccagtcctgcctggcagaagatcatgcagtttggaagttttcatgtactgatgaaagatactctacagaacttgtcaaatctttgaaacttggaatatattgctttcataatatgaagttttattgcctatccaaaaaaaaaaaaaaaa

SEQ ID NO: 156 - DNA, 1199 bp, Homo sapiens
gcccgaccgctttccgggagactggagtcgaaggccgtgaggtatttttctaagtcagccataatggcaggtgaagaaattaatgaagactatccagtagaaattcacgagtatttgtcagcgtttgagaattccattggtgctgtggatgagatgctgaagaccatgatgtctgtttctagaaatgagttgttgcagaagttggatccacttgaacaagcaaaagtggatttggtttctgcatacacattaaattcaatgttttgggtttatttggcaacccaaggagttaatcctaaggaacatccagtaaaacaggaattggaaagaatcagagtatatatgaacagagtcaaggaaataacagacaagaaaaaggctggcaagctggacagaggtgcagcttcaagatttgtaaaaaatgccctctgggaaccaaaatcgaaaaatgcatcaaaagttgccaataaaggaaaaagcaaaagttaactttttggttttgatgtacacatattcaaaaagtacatcttccccccccccccccccccgcaaaataattctgtggcagggcaaggtttaaatgtgtttcttattaatatgtaaattcacagtaaatatgtaaagctaaatactttcctctccaaagatcattatctttattgattagcactgaggattttaacattgtgatatattatatatttataatttaccatctcttgatgagactcttatttctttatataggtcagtcttgcaagtaccattttataagcagctgtgaaatttaagtgaaatgttctttgtaaacatttgtactattttaaatgaataatgaccttatgaagtatgctatctgtaggctgaaattataggtacatctgttttcaccatatgatattaagaaagcgtgaaatgacttaaatgttcatttttttctgtatagatactttatcatgttttcatgattttaggaattactgctttgttgatattcaaagtgtgaaactaaaactttatggttgtactttaattcttggcatgttgcctctatgtcccatttaaaataaaatacattctcattaactttagatgggaaataaggttgtatgttgatggatgaattttggcatgatgactgtactctcaataaaggctgaaaatgttgcaaaaaaaaaaaaaaaaaaaaaaaaaaaaaa

SEQ ID NO: 157 - DNA, 1895 bp, Homo sapiens
agctccagctgtccctcccgcagttggccctgtggtgttccgaagccggttacgtacggcctgagggccaggcgaacctcaggctctttgtcctactaaaaagcgcagcacaatggtagaagcagatcatcctggcaagcttttcattggtggcctcaatagagaaaccaatgagaagatgcttaaagcagtatttgggaaacatggtcccatatcagaagttcttttgataaaggatcgaaccagcaaatccagaggctttgcatttattacttttgagaaccctgcagatgctaagaatgctgcgaaagatatgaatggaacgtctttgcatggaaaagcaataaaagtagaacaagccaagaaaccatcttttcaaagtggtggtaggcggagaccaccagcttcttcgagaaacagaagcccttcaggaagtctgagatctgcaagaggaagcagtggaggaacaagagggtggcttccctcacatgaagggcacctggatgatggtggatacactcctgatctcaagatgagttattctaggggactcattccagttaaaagaggtccatcttcaagaagtggaggtcctcctccgaaaaaatctgctccttctgctgtggcaagaagcaatagttggatgggaagccaaggtcccatgtcacaaagaagagagaattatggagttcctccacgcagagcgacaatatcttcctggagaaatgatcgcatgtcaacaagacatgatggttatgcaactaacgatggaaatcatccaagttgccaagaaacgagggattatgctccaccatctagaggctatgcataccgtgataatggtcattctaatcgggatgaacattcctctagaggatatagaaatcatcgaagttcccgagaaactagggattatgctccaccatctagaggccatgcataccgtgattatggtcattctcgtcgggatgaaagttattctagaggatacagaaatcatcgaagttcccgagaaactagggagtatgctccaccatctagaggccatggataccgtgattatggtcattctcgtcgacatgaaagttattctagaggatatagaaatcatccaagttcccgagaaaccagggattatgctccaccacatagagactatgcataccgtgattatggtcattctagttgggatgaacattcctctagaggatatagttatcatgatggctacggtgaggcccttggtagagatcattctgaacatctaagtggaagttcttatagagatgcacttcagagatacgggacctctcatggtgcaccacctgcaagagggcctcggatgtcttatggtggaagcacctgccacgcatatagtaatacacgagatagatatggcagaagttgggagagttactcgagctgtggtgattttcattattgtgatcgtgagcatgtttgcagaaaagaccaaaggaatccgccttctctgggtagggtgctccctgatcctcgtgaagcatatggtagctcaagttatgtggcatctatagtagatggtggggagagtcgatctgaaaaaggagactcgagcagatattaaagcaagcattgaaaataatagttattgcataccaatccttgtttgcaaatcaaaaattgaaatgttatttctgcattgttacctgcatattactgaaagaaacatgttggttttgtggagagaggtagatactaacttcctccatgaattttttgaggtattcaaaggaaaaggaattgttttcaaagtaatttcatacttgttgatgctatttgaaaagtgtttagatgtaatatctaccttaaaattttcacaataaaattttacatgtactgcaaaaaaaaaaaaaaaa

SEQ ID NO: 158 - DNA, 1399 bp, Homo sapiens
gctcctccgagctcgctgttcgtccgggttttttacgttttaatttccaggacttgaactgccatgtcctctgaagaaggaaagctcttcgtgggagggctcaactttaacaccgacgagcaggcactggaagaccacttcagcagtttcggacctatctctgaggtggtcgttgtcaaggaccgggagactcagcggtccaggggttttggtttcatcaccttcaccaacccagagcatgcttcagttgccatgagagccatgaacggagagtctctggatggtcgtcagatccgtgtggatcatgcaggcaagtctgctcggggaaccagaggaggtggctttggggcccatgggcgtggtcgcagctactctagaggtggtggggaccagggctatgggagtggcaggtattatgacagtcgacctggagggtatggatatggatatggacgttccagagactataatggcagaaaccagggtggttatgaccgctactcaggaggaaattacagagacaattatgacaactgaaatgagacatgcacataatatagatacacaaggaataatttctgatccaggatcgtccttccaaatggctgtatttataaaggtttttggagctgcactgaagcatcttattttatagtatatcaaccttttgtttttaaattgacctgccaaggtagctgaagaccttttagacagttccatctttttttttaaattttttctgcctatttaaagacaaattatgggacgtttgtagaacctgagtatttttctttttaccagttttttagtttgagctcttaggtttattggagctagcaataattggttctggcaagtttggccagactgacttcaaaaaattaatgtgtatccagggacattttaaaaacctgtacacagtgtttattgtggttaggaagcaatttcccaatgtacctataagaaatgtgcatcaagccagcctgaccaacatggtgaaaccccatctgtactaaacataaaaaaattagcctggcatggtggtgtacgcctgtaatcccagtgacttgggaggctgaggcaggagaatcgcttgaacccgggaggcggaggttgcagtgagctaagatcgcgccactgtactccagcctgggcaacagcgagactccatctcaaaaaaaaaggaaatgtgtatcaagaacatgattatccaggggtattttctaattcagatcatcaaactgattatatagaagagttggctttaaaatgtttgcaaatgtctttttttttttaatactggaagaaaaaatattctgttgtgtctcatacagtgcttaggatgtctttcacagagcttattaaaaagatgaaacctgaaaaaaaaaaaaaaaaaaaa

SEQ ID NO: 159 - DNA, 3594 bp, Homo sapiens
gcggcgcccagggcggtagcgtgaaacttggtggaagacgctgaccagtcgtgttggaatcaaaacagcggggaccctgcgccatgtcgcgactgatcgtgaagaatctcccgaatgggatgaaggaggagcgtttcaggcagctgtttgccgccttcggcacgctgacagactgcagcctgaagttcaccaaagatggcaagttccgcaagtttggttttattggcttcaagtccgaggaagaggcccagaaggcacagaagcatttcaacaagagcttcatcgacacatcccggatcacagtggagttctgcaagtcattcggggacccggccaaacccagagcctggagcaaacatgcccagaaaccaagccagcccaagcagcctccaaaagactctactactccagaaattaagaaagatgagaagaagaaaaaggtggcaggtcaactggagaagctgaaggaggatacagagttccaggagtttctgtcagttcatcagaggcgggcgcaggcagccacttgggcgaatgatggcctggatgctgagccctcgaaagggaagagcaagccggccagtgactacctgaacttcgactccgattctgggcaggagagtgaggaggagggagccggggaggacctggaagaagaggcaagcctcgaaccaaaggcagctgtgcagaaggagctgtcggacatggattacctgaaatccaagatggtgaaggctgggtcgtcctcttcctcggaggaagaggaaagtgaagatgaagccgtgcactgtgatgaagggagtgaggccgaggaagaggattcctccgccaccccagtcctgcaggaaagagacagcaggggtgcaggccaagagcaagggatgccagctgggaaaaagagaccaccggaggccagagccgagacagagaaaccagcaaaccagaaggaacccaccacctgccacaccgtgaagctgcggggagccccgttcaatgtcacagagaaaaatgttatggaattcctggcacccctgaaaccagtggccattcgaattgtgagaaacgctcatgggaataaaacaggatacatctttgtggatttcagcaatgaagaggaagtgaagcaagctctgaaatgcaaccgggagtacatgggtgggcgctacatcgaggtgttcagggaaaagaacgtccccaccaccaagggtgcaccaaagaataccaccaaatcctggcaaggccggatactcggggagaacgaagaggaggaggacctggccgaatccggaaggctctttgtacggaacctgccctacaccagcaccgaggaggatctggagaagctcttctccaaatacggtcccctgtctgagctccactaccccatcgacagcctgaccaagaaacccaagggttttgcattcatcaccttcatgttccctgagcacgctgtgaaggcctactcggaggtggacgggcaggtattccagggcaggatgctccacgtgttaccatctaccatcaagaaggaagccagcgaggatgccagtgccctgggatcgtcgtcctacaagaagaagaaggaggcccaggacaaagccaacagtgccagctctcacaactggaacacactattcatggggccgaatgccgtggccgatgccatcgcacagaagtacaacgccaccaaaagtcaagtgtttgaccacgagaccaagggcagcgtggccgtgcgcgtggctctgggggaaacccagctcgtccaggaagtgcggcgttttctcatagacaacggggtcagcctggattccttcagccaggctgcagcagagcgaagcaagactgtgattctggtcaagaacctcccggcaggcaccctggcggccgagctgcaggagaccttcggccgttttggcagcctgggccgcgtgctgctgccagagggcggaaccactgccatcgtggagttcctggagcccctggaggcccgcaaggccttcaggcatctggcctattccaagttccatcatgtccccctctatctggagtgggctccagttggcgtcttctccagcgcagccccacagaagaaaaagctccaagacacaccttcagaacccatggaaaaggacccagcagagccagaaacagtgcctgatggcgaaaccccagaagatgaaaatccaacagaggaaggagcagacaactcttcagcaaagatggaagaggaggaggaggaagaggaagaagaagaagagagcctcccaggatgtactctgtttattaagaatctcaattttgacacaacagaagagaagctgaaggaagtgttttcaaaagtggggacagtgaagagctgctccatctccaagaagaagaacaaagcaggagtgctcctttccatggggtttggatttgtggaatacaggaagccggagcaagcccagaaagctctcaagcagctccagggtcacgtcgtggacggccacaagctggaagtgaggatctcggaacgagccactaagccagccgtgacattggctcggaagaaacaagttcccagaaagcagaccacctccaagatcctggtgcggaacatccccttccaggcccacagccgggagatccgagagctcttcagcacctttggggagttgaagacggtccgcctgccaaagaagatgactgggacaggcacacacagaggcttcggctttgtggacttcctcaccaagcaggatgcgaagagagccttcaacgccctgtgtcacagcacccacttgtacgggcggaggctggtgctggagtgggccgactccgaggtgaccctgcaggccctgcggcggaagacggccgctcactttcacgagcccccgaagaaaaagcggtctgtggtgttggacgagatcctggagcagctggaaggcagtgacagcgacagcgaggagcagacccttcagctgtgagctggcaccgagaggggctgctgagctagaattcccacctatgtctttccaagggactgttcacggcttgggacttggtctctgtcctgccccatcctcgtcacttgggaccacgagccctggttcagtcacccagggaagcctcccagcggctcatgaagcatcgagctccaagcccagatgccaagctccctggctgagctgaatgatgtcactcatggtggacgcgttctgctcacgggcccagagccctgtgaaatgcatcaaggtcctctccgctggccagcagcatccccaggcttctctcaggcgcccgtgttcacattttctccagcctgagacgcagcctcccgcctggaagggcctgtgccagcaccaggcagagggcaagacggagagggcagagcaagaactgcactgcatctcactgcagtctgaatctagacatcgccattccccgaggtgcgacctcagactaatgacatcctggctgagcctctgtttttctctctaggaaatgggggtgataattgtgcctacctcagatagacagtgccagaattaagtgagtcaagccaagtaaagcccagagaagattctcatcaaaaaaaaaaaaaaaaaaaaaaaa

SEQ ID NO: 160 - DNA, 3594 bp, Homo sapiens; identical to SEQ ID NO: 159

SEQ ID NO: 161 - DNA, 1617 bp, Homo sapiens
ccacgcgtccgggctcgggagaggagtggacgccgctggccaggatggtgctggagagcgtggcccgtatcgtgaaggtgcagctccctgcatatctgaagcggctcccagtccctgaaagcattaccgggttcgctaggctcacagtttcagaatggcttcggttattgcctttccttggtgtactcgcacttcttggctaccttgcagttcgtccattcctcccgaagaagaaacaacagaaggatagcttgattaatcttaaaatacaaaaggaaaatccgaaagtagtgaatgaaataaacattgaagatttgtgtcttactaaagcagcttattgtaggtgttggcgttctaaaacgtttcctgcctgcgatggttcacataataaacacaatgaattgacaggagataatgtgggtccactaatactgaagaagaaagaagtataataataataacaatattttctcattctttgtgtatagaaaattttaaaatggtggtcttaattattactactggttgaacaattatttcttccaatttattttcttcctgcactactgtttgtatttgatcctttgtctattcagtcacttaattagaaattaaattgtcaagcctcttattctgacttcaaagaattaatgtatcttccaacaataaaatcacttctgattttaatctaggaaaacctaaattgtggctatggatccaaagctgtttgtttctttgaatatcaatattttcaacaggatcttgtatttaaaattcccacctacattgttaaatatgttattttttcatatctcttttggttttgataatctgaagtgtttttttctcgttttggccttccaaactgcatttggttaggtgaattaagaaaaatattgccatcaagaattacttgtgttttcacagagatagactctttgctttatagagattgttgtgtatttaatatgaatatcccagctttagaaaagaagtaaactggatacaaaaagttccattgaggaacagttatttacagtataaaagatttgtttactttacaaaaggcttgtgtctgtgtgtgtgtgtgtgtgtgtgtgtgtgtgtattttaaactgactcagtgacagctggggtggaatggcaagaacacttacaaccaaactcatgggctgctgcaatttgaagatcaattggtaataaacataagacattaattcatattaaaatagttcagtgttcaaaattgtgtttatgtggatatttttctctttttaacactataaaccattaaaatacagtcatcccttgtatacgctagggactggttccagggccacacatataccaaaatctgcccatactcaagtcccacagaaagtcttgcagaacccatatgtagaaaagttggccctccagttgaccctccgtacacatgagtttcacatcccatgcacaaatgctgatctgtgtgacctcacctgcatttgattgaaaaaagtatgcgcgtaagtgtacccacccagttcaaacccgtgtgtaagggtcaactgtacaaaaaagtttgtgaaataaacgtactggagaatctttaaaaaaaaaaaaaaaaaaaaaaaa

SEQ ID NO: 162 - DNA, 773 bp, Homo sapiens
ggcacgaggctttgccacttgtacccgagtttttgattctcaacatgtccgagactgctcctgccgctcccgctgccgcgcctcctgcggagaaggcccctgtaaagaagaaggcggccaaaaaggctgggggtacgcctcgtaaggcgtctggtcccccggtgtcagagctcatcaccaaggctgtggccgcctctaaagagcgtagcggagtttctctggctgctctgaaaaaagcgttggctgccgccggctatgatgtggagaaaaacaacagccgtatcaaacttggtctcaagagcctggtgagcaagggcactctggtgcaaacgaaaggcaccggtgcttctggctcctttaaactcaacaagaaggcagcctccggggaagccaagcccaaggttaaaaaggcgggcggaaccaaacctaagaagccagttggggcagccaagaagcccaagaaggcggctggcggcgcaactccgaagaagagcgctaagaaaacaccgaagaaagcgaagaagccggccgcggccactgtaaccaagaaagtggctaagagcccaaagaaggccaaggttgcgaagcccaagaaagctgccaaaagtgctgctaaggctgtgaagcccaaggccgctaagcccaaggttgtcaagcctaagaaggcggcgcccaagaagaaataggcgaacgcctacttctaaaacccaaaaggctcttttcagagccaccactgatctcaataaaagagctggataatttctttaaaaaaa

SEQ ID NO: 163 - DNA, 1716 bp, Homo sapiens
cagactcaccagttcctgctttgatgtgacatgtgactccccagaatacaccttgcttctgtagaccagctccaacaggattccatggtagctgggatgttagggctcagggaagaaaagtcagaagaccaggacctccagggcctcaaggacaaacccctcaagtttaaaaaggtgaagaaagataagaaagaagagaaagagggcaagcatgagcccgtgcagccatcagcccaccactctgctgagcccgcagaggcaggcaaagcagagacatcagaagggtcaggctccgccccggctgtgccggaagcttctgcctcccccaaacagcggcgctccatcatccgtgaccggggacccatgtatgatgaccccaccctgcctgaaggctggacacggaagcttaagcaaaggaaatctggccgctctgctgggaagtatgatgtgtatttgatcaatccccagggaaaagcctttcgctctaaagtggagttgattgcgtacttcgaaaaggtaggcgacacatccctggaccctaatgattttgacttcacggtaactgggagagggagcccctcccggcgagagcagaaaccacctaagaagcccaaatctcccaaagctccaggaactggcagaggccggggacgccccaaagggagcggcaccacgagacccaaggcggccacgtcagagggtgtgcaggtgaaaagggtcctggagaaaagtcctgggaagctccttgtcaagatgccttttcaaacttcgccagggggcaaggctgaggggggtggggccaccacatccacccaggtcatggtgatcaaacgccccggcaggaagcgaaaagctgaggccgaccctcaggccattcccaagaaacggggccgaaagccggggagtgtggtggcagccgctgccgccgaggccaaaaagaaagccgtgaaggagtcttctatccgatctgtgcaggagaccgtactccccatcaagaagcgcaagacccgggagacggtcagcatcgaggtcaaggaagtggtgaagcccctgctggtgtccaccctcggtgagaagagcgggaaaggactgaagacctgtaagagccctgggcggaaaagcaaggagagcagccccaaggggcgcagcagcagcgcctcctcaccccccaagaaggagcaccaccaccatcaccaccactcagagtccccaaaggcccccgtgccactgctcccacccctgcccccacctccacctgagcccgagagctccgaggaccccaccagcccccctgagccccaggacttgagcagcagcgtctgcaaagaggagaagatgcccagaggaggctcactggagagcgacggctgccccaaggagccagctaagactcagcccgcggttgccaccgccgccacggccgcagaaaagtacaaacaccgaggggagggagagcgcaaagacattgtttcatcctccatgccaaggccaaacagagaggagcctgtggacagccggacgcccgtgaccgagagagttagctgactttacacggagcggattgcaaagcaaaccaacaagaataaaggcagctgttgtctcttctccttatgggtagggctctgacaaagcttcccgattaactgaaataaaaaatatttttttttctttcagtaaaaaaaaaaaaaaaaaaaaaaaaaaaaaaaaaaaaaaaaa

SEQ ID NO: 164 - DNA, 2247 bp, Homo sapiens
gacgacctgtctcgccgagcgcacgccttgctgccgccccgcagaaatgcttcggttacccacagtctttcggcagatgagaccggtgtccagggtactggctcctcatctcacccgggcttatgccaaagatgtaaaatttggtgcagatgcccgagccttaatgcttcaaggtgtagaccttttagccgatgctgtggccgttacaatggggccaaagggaagaacagtgattattgagcagagttggggaagtcccaaagtaacaaaagatggtgtgactgttgcaaagtcaattgacttaaaagataaatacaagaacattggagctaaacttgttcaagatgttgccaataacacaaatgaagaagctggggatggcactaccactgctactgtactggcacgctctatagccaaggaaggcttcgagaagattagcaaaggtgctaatccagtggaaatcaggagaggtgtgatgttagctgttgatgctgtaattgctgaacttaaaaagcagtctaaacctgtgaccacccctgaagaaattgcacaggttgctacgatttctgcaaacggagacaaagaaattggcaatatcatctctgatgcaatgaaaaaagttggaagaaagggtgtcatcacagtaaaggatggaaaaacactgaatgatgaattagaaattattgaaggcatgaagtttgatcgaggctatatttctccatactttattaatacatcaaaaggtcagaaatgtgaattccaggatgcctatgttctgttgagtgaaaagaaaatttctagtatccagtccattgtacctgctcttgaaattgccaatgctcaccgtaagcctttggtcataatcgctgaagatgttgatggagaagctctaagtacactcgtcttgaataggctaaaggttggtcttcaggttgtggcagtcaaggctccagggtttggtgacaatagaaagaaccagcttaaagatatggctattgctactggtggtgcagtgtttggagaagagggattgaccctgaatcttgaagacgttcagcctcatgacttaggaaaagttggagaggtcattgtgaccaaagacgatgccatgctcttaaaaggaaaaggtgacaaggctcaaattgaaaaacgtattcaagaaatcattgagcagttagatgtcacaactagtgaatatgaaaaggaaaaactgaatgaacggcttgcaaaactttcagatggagtggctgtgctgaaggttggtgggacaagtgatgttgaagtgaatgaaaagaaagacagagttacagatgcccttaatgctacaagagctgctgttgaagaaggcattgttttgggagggggttgtgccctccttcgatgcattccagccttggactcattgactccagctaatgaagatcaaaaaattggtatagaaattattaaaagaacactcaaaattccagcaatgaccattgctaagaatgcaggtgttgaaggatctttgatagttgagaaaattatgcaaagttcctcagaagttggttatgatgctatggctggagattttgtgaatatggtggaaaaaggaatcattgacccaacaaaggttgtgagaactgctttattggatgctgctggtgtggcctctctgttaactacagcagaagttgtagtcacagaaattcctaaagaagagaaggaccctggaatgggtgcaatgggtggaatgggaggtggtatgggaggtggcatgttctaactcctagactagtgctttacctttattaatgaactgtgacaggaagcccaaggcagtgttcctcaccaataacttcagagaagtcagttggagaaaatgaagaaaaaggctggctgaaaatcactataaccatcagttactggtttcagttgacaaaatatataatggtttactgctgtcattgtccatgcctacagataatttattttgtatttttgaataaaaaacatttgtacattcctgatactgggtacaagagccatgtaccagtgtactgctttcaacttaaatcactgaggcatttttactactattctgttaaaatcaggattttagtgcttgccaccaccagatgagaagttaagcagcctttctgtggagagtgagaataattgtgtacaaagtagagaagtatccaattatgtgacaacctttgtgtaataaaaatttgtttaaagttaaaaaaaaaaaaaaaaaaa

SEQ ID NO: 165 - DNA, 4815 bp, Homo sapiens
aggctcggagcggaagtgagactagggagtctgtccgccattgtggacccgagaagcagagagcgagagggggaagaggagcgtgcaagcggaaaagacgggcctcttcctccgactcccgagcgcgaggccctcattttgggttctcagcgaacggcggcagcggcggcggctggaacaatcactcggccaagggcgacagccaactgctgtgagtgcacggggagaggcccaggcagcggcggcggcggcggctctcgggttgcggtgaagaatgtcagccactagcgtggatcagagacctaaagggcaaggaaataaagtttcagtacaaaacggttcgattcatcaaaaagatgctgtaaatgatgatgattttgagccatacttaagtagccagacaaatcagagtaacagctatccaccaatgtcagatccatacatgcctagttactatgctccatccattggatttccatattctcttggggaagcagcgtggtccacagctggagaccagcctatgccatatctgacaacctatggacaaatgagtaatggagaacatcactatataccagatggtgtatttagtcaacctggggcattaggaaatacccctccatttcttggtcaacatggatttaacttttttcctggtaatgctgatttctctacatgggggacaagtggatctcagggacaatcaacacaaagttctgcttatagtagcagttatggctatccacctagttctcttgggagagctattactgatggacaggctggatttggcaatgatactttgagtaaggtgcctggcattagcagtattgagcaaggcatgactggactgaaaattggtggtgacctgacagctgcagtgacaaaaactgtaggtacagctttgagcagcagtggtatgactagcattgcaaccaatagtgtgcccccagttagcagtgcagcacctaaaccaacctcctgggctgccattgccagaaagcctgccaaacctcaaccgaaacttaaacccaagggcaatgtgggaattgggggttctgctgtaccaccacctcctataaaacacaacatgaatattggaacttgggatgaaaaagggtcagtggtaaaggctccaccaacccaaccagttctgcctcctcaaactataatccagcagcctcagccattaattcaaccaccaccattggtgcaaagccaactgcctcaacagcagcctcaaccaccacaaccacagcagcaacaaggacctcagccacaggcccagcctcaccaagtgcagcctcaacagcagcagctgcagaatcgctgggtagctcctcgtaacaggggagcaggcttcaaccagaacaatggagcgggcagtgaaaactttggtttaggtgttgtacctgtcagtgcttcaccttctagtgtagaagtgcatcccgtgctggaaaagctaaaggccataaacaactataatcccaaagactttgattggaatctgaagaatggacgtgtgtttataattaaaagctactctgaggatgacatacatcgttccattaaatactctatctggtgtagtactgagcatggtaataagcgtttggatgcagcttaccgttccctgaatgggaaaggcccactctatttactcttcagtgtgaatggcagtggacatttttgtggagtggctgaaatgaagtctgttgtggactataatgcgtatgctggtgtctggtctcaggataagtggaagggcaaatttgaagttaaatggatctttgtcaaagatgttcccaataaccaattacggcatattcgcttagaaaataatgacaacaaaccggttaccaattcaagggacactcaagaggtacccctagaaaaagctaagcaagtgcttaaaataattgctactttcaagcataccacctcaatctttgatgactttgcacattatgaaaagcgtcaagaagaggaggaagccatgcgtagggagagaaatagaaacaaacaataaccgtatgaagatgtcctgttaaatttacaacactaacgatgtagactctggaaatgcctaataagtcaaagaagacgtattaaagctcttttctgcttaaggtgacatctttgaacactttaacacaaagttgactcttctcgtaatggttttcatcagcgcatctgcccttatactcttcaccaaacacacttgagaactgtaacttcgtcaagcactttctgtcctgaagcttttaccagtatctgctgtcttttgtaattatgcatcctagctaaggcacagaagactgaatgaatgcaaggattcattaactctttgaatttgttaaatactaacagttaaccattagaagtggttcaatgatgtaagagtcacactgcttcaactttttctttgttgtagtttttaaattgtcgatttttagctatttgacagattaaaagcaaaataatcatgccatatttagtcctggagttcaagtctaaatgttgatgtgaaaaattattgtagtaaacttttaatatggcaaagcaaccttaagctctattttagccaaatgaaacataatctgaaattatattagaacatttcccttgtcttcaaactgtttggtgtaacagaatattgatatgcagcttggtggatttcaccagttaatgcacattcttcttccctcctccccccattaatatgtatactgaaaaatgtgcatttgtctgaggaattattttgtttgctaccacttaatgaatctcaaaattttgagtaaatgtacctcagtctaatcagactttttatgacctttataactacatttaaaacccttaattcctatttctgggtgtttgcgagcctgattgctatcatgaagtaaaaatttattactctaggtattcactagctaaataaacatagttcttgtttagcaagcatatgttgttcctcagctcttttctccagcttttgcagtgtcctggcatccttaaaatactttgaaaatatggccttgatccatggattaaatcagtatctaagtgaatgtgttgatgttttattgatcagatctatataagtgggaatacagcatatatctggatattcttatagttatctttttaacatcttatttttttcattaattacatatcaacattaattttgtatcttgaagcaaattgattttgtataattaaatgtgtcaagcatctgtattaattgatttgatggcataaggttatgaaaataatgtactgccccatgtattactgttccaaaaggagaaagctatgtagaaagatacattaagggtgaaaatagcaatacagtagatttgaataccttgatgttttgcattacttcatttatgtttacatcatgtttagaaatgttttcatttactgtggtctttggtcacttaagctcaaagacctagtgatggatatttctttgaggctttcatttatataattttattttgtacaatgttttttttaaatgtgcaaatactgtattcaagtgaaaaaaatacagtatttgtagataaccatagctactacacagttcttcggtagtcccagtgtagttatatcagtgtttactgaagggaacatcaaaatattaatggtatattataaaataaagactttcttaaaggaaaattgcacctattttacctttttaagagtaagccatgaaatcttgtaacatgtctcttaactatttataatgaaaagtggcatttgggtatagtcaccacagcaatgttctacatccctaagattatctaggtaggacatgtcaaagatgactgttgtcattctggaggtcctattagagaatattataaaagggtgaccttgtaggaaggatctgagtcctccccctgaggttctctttttcttggtgctttattagcaactctggatatttttataaaactagttacattataaacggtttcaaacatgtttaatttacattaggtttttatgtaagagtgtcatggaagcactcagcaagcaggctgattgcaatagactcagacatgcgaataaatgtaattgagagtctattcatggtgaggagtacatcccagtgcctttaacctggatttctaatcttaagtgaaatgggtgcagcattcctttggaaaaaaaaatctttttattttcaagtgataattttgtgtttttctcatataagttttctccagagcacccaccttctcttccttcttggtctgtcattatattgcaaaatatttttcctctgaatgaaattatcacaggttgtctcaagcacaaccaactgaatgtctcttaactgtggggaccaaaagggagagagcctggggtctacaagaggagacacatcatcaaatgtttgaatgatcacaaattaagacattatcagcccagtaaatttcttgcttaatgtttttccaagttctggcttgaatatttcttattaaagctatcttatgtgggtattttattttgaaaggtattatagtttgtatatttaacagtaaggaggaaactgtaaccaaaattagtatttctctatacgtattggtacttgaagattcctttcaaaagaaatccagcgttttcctaattttagtacttaatttctctttttaatttaagtgatctttctaattcgaaagctgtgttctttttgaataccgtgcatgggggttaagctgatgttaaaacagtttgcaataaaaaaaaatgaatcagcttaaaaaaaaaaaaaaaaaaaaaaaaaaaaaaaaa

SEQ ID NO: 166 - DNA, 1669 bp, Homo sapiens
ggggagagtagacagcagaaccagcggcggcggctaagcagagactgtagtagcggcgacagcgacgacggcagcgatggctggggcggggccagccccgggactcccgggtgcaggaggacccgtggtcccgggtcctggcgctggcatcccgggcaaaagcggcgaggaacgcttgaaggaaatggaggcggagatggccctgtttgagcaggaagttctgggggctccagtacctggaatcccaactgctgtgcctgcggtgcccactgtccccacggtccccacagtagaagcgatgcaggtcccagcggctcctgtgatccgcccaattatcgcgaccaacacataccagcaggtccagcagactctggaggcccgagcagctgctgcagccacagtagttcctcccatggtgggtggccctccttttgtaggccctgttggctttggccctggtgatcggagtcacctggacagcccagaggctcgagaagccatgttcctgcggcgggcagctgtggccccccagagggcccctatcctgcgtccagccttcgtcccccacgtgctacagagagcagattccgctctctcctctgcagcagccggcccccgccctatggccctacggccccctcaccaggccctcgtgggcccccctctgcctgggccccctggaccacccatgatgctgccaccaatggctcgggctccagggcccccgctgggctccatggctgcactgaggccccctctggaagagccagcagcaccccgagagctgggcctaggcctggggttgggcctgaaagagaaggaagaggcagtggtggcggcggcggctgggctggaggaggctagcgcggctgtggccgtgggggcaggaggtgccccagctggccctgcagtcattgggcccagcctgccgctggccctggccatgccattgcccgagcctgagcccctgcccctcccgttggaggtcgtccgcggcctcctgcccccgctgcgcattcctgaactcctgtccctgcgtcctcggccccggccccctcggccagagccacccccaggcctcatggctcttgaggtcccagagcccctgggtgaagacaagaagaaggggaagccagagaaattgaaacggtgcattcgcacagcggcagggagcagctgggaggaccccagcctgctggagtgggatgcagatgacttccggatcttctgtggggatctgggcaatgaggtgaacgatgacatcttggcacgcgccttcagccgcttcccatccttccttaaggccaaggtgatccgtgacaagcgcacaggcaagaccaagggctacggcttcgtcagcttcaaggaccccagcgactacgtgcgcgccatgcgtgagatgaatgggaagtatgtgggctcgcgccccatcaagcttcgcaagagcatgtggaaggaccggaatctggacgtggtccgcaagaagcagaaggaaaagaagaagctgggcctgagatagggtctgtggccaggcacccgctcccacctggccgggcgctggctcctccctcagttctctttggaaaacccccagctgtccacccatcccctgccccaaaaccagtttcaataaatttacgttcatttccaaaaaaaaaaaaaaaaaaaa

SEQ ID NO: 167 - DNA, 2682 bp, Homo sapiens
ctccgcgcaaggcttattcttctacatccatagatgcttgagaagctctgtttttgtcattcatgtacattttcctttggaaaaagaaagcgcctattttactaaccaaagacttgatttttaccctcttcatttttattccctcctaaaaataagcccaattggatccaagtcaatgttttaagagatttttttaagagttgttttttctttcagagaccagaattccaaatcagaacaatttaaggtgataagctgcgatctttgagctagctataaataagacatttcaagcaagcaagcaaacaacttaaatttggggtagaggaaaaaaaaggcgtgagacatcaggttgtcattttttattgtgagattctgctcctaaagataataaatgggggattacgggtttggagtgctagtgcaaagcaatactgggaataaatctgcttttccagtcagattccatccacatctgcagcctccacaccatcaccaaaatgccacccccagccctgctgcttttataaataataacacagctgccaatggcagcagtgctgggtcagcttggctttttcctgctccagctacccataacattcaggatgagatcttggggtcagaaaaagcaaaaagtcagcaacaggaacagcaagaccccttagaaaagcagcagctttccccaagtccaggtcaggaagctggaatactgcctgaaacagagaaggcaaaatcagaagaaaatcaaggggacaattcttcggaaaatggcaatgggaaggagaaaataaggatcgaatctccagtgttgacagggtttgattatcaagaagccactgggctaggtacttcaacccaacccttgacatctagcgcatcgtctcttactggtttcagtaactggtcagcagcgatagcgccttcctcctctacaataatcaatgaagatgcaagtttctttcaccagggaggggtccctgctgcttcggctaataacggtgctctgttgtttcaaaatttcccccatcatgtcagccctggctttggaggcagcttctctcctcagatcgggcctctctcacagcaccacccacatcaccctcatttccagcatcatcacagccagcatcagcagcaaaggaggtctcctgccagtccccatcccccacccttcacacatagaaatgctgcttttaaccagctgcctcatttggcgaataatcttaacaaacccccctctccgtggagcagctaccagagtccgtcaccaacaccctcctcttcctggagcccgggcggtggtggatatggtggctggggaggttcccaaggccgagatcaccgcagagggctgaatggtggaataacgcccctgaactccatctcgcctttgaagaaaaattttgcaagcaatcatattcagctccagaagtatgctcgccccagctctgcctttgcacctaaatcctggatggaagatagcttgaacagggctgacaacatttttccttttccggatcgccccaggacattcgacatgcactcactggagagttcactcattgacataatgagagctgaaaatgataccattaaaggtcgtctaaactattcatatccaggatccgatagctctctgcttattaatgcaaggacatatgggcgaaggagaggtcagtcttcactgtttccaatggaagatggattcttggatgatggccgtggggatcagcctcttcatagtggcctgggttcacctcactgcttcagtcaccagaatggggaaagagtggaacgatattctcgaaaggtgtttgtaggcggattgcctccagacattgatgaagatgagatcacagctagttttcgtcgctttggccctctgattgtggattggcctcataaagctgagagcaaatcctattttcctcctaaaggctatgcattcctgctgtttcaagatgaaagctctgtgcaggctctcattgatgcatgcattgaagaagatggaaaactctacctttgtgtatcaagtcccactatcaaggataagccagtccagattcggccttggaatctcagtgacagtgactttgtgatggatggttcacagccacttgacccacgaaaaactatatttgttggtggtgttcctcgaccattacgagctgtggagcttgcgatgataatggatcggctatatggaggtgtgtgctacgctgggattgataccgaccctgagctaaaatacccaaaaggagctgggagagttgcgttctctaatcaacagagttacatagctgctatcagtgcccgctttgttcagctgcagcatggagagatagataaacgggtggaagttaagccatatgtcttggatgatcagctgtgtgatgaatgtcagggggcccgttgtggggggaaatttgctccatttttctgtgctaatgttacctgtctgcagtattactgtgaatattgctgggctgctatccattctcgtgctggcagggaattccacaagcccctggtgaaggaaggcggtgaccgccctcggcatatttcattccgctggaactaaaggataactgcagtgctcattttcaggcctcagaataagtgcactcttctgttcattctgaccccttcctcaacctcttcacgctggcatgtcctttt

SEQ ID NO: 168 - DNA, 3265 bp, Homo sapiens
gcgtgcacgctgacgccgcgcagtctcgtcccctgccgccgccgtcgccgctgctgtcgccgccgccgccgccattggagtcgacgcctcctcagtgcgtccgcgtcccgggctcaccgccgctgccgcctcgccaggggcccgcgcgcccagcagccgccgccgccgcccggccggcgcccggggaattggcggcggggcccggggccgcgcgagctagggtgacaggcccggcctctaggggaggcccgagccggcgggcgccccggccccgcgtctagttgttcatgaagcatgtcggccaccagcgtggacacccagagaacaaaaggacaagataataaagtacaaaatggttcgttacatcagaaggatacagttcatgacaatgactttgagccctaccttactggacagtcaaatcagagtaacagttacccctcaatgagcgacccctacctgtccagctattacccgccgtccattggatttccttactccctcaatgaggctccgtggtctactgcaggggaccctccgattccatacctcaccacctacggacagctcagtaacggagaccatcattttatgcacgatgctgtttttgggcagcctgggggcctggggaacaacatctatcagcacaggttcaattttttccctgaaaaccctgcgttctcagcatgggggacaagtgggtctcaaggtcagcagacccagagctccgcgtatgggagcagctacacctaccccccgagctccctgggtggcacggtggttgatgggcagccaggctttcacagcgacaccctcagcaaggcccccgggatgaacagcctggagcagggcatggttggcctgaagattggggacgtcagctcctccgccgtcaagacggtgggctctgtcgtcagcagcgtggcactgactggtgtcctttctggcaacggtgggacaaatgtgaacatgccagtttcaaagccgacctcgtgggctgccattgccagcaagcctgcaaaaccacagcctaaaatgaaaacaaagagcgggcctgtcatggggggtgggctgccccctccacccataaagcataacatggacattggcacctgggataacaaggggcctgtgccgaaggccccagtcccccagcaggcaccctctccacaggctgccccacagccccagcaggtggctcagcctctcccagcacagcccccagctttggctcaaccgcagtatcagagccctcagcagccaccccagacccgctgggttgccccacgcaacagaaacgcggcgtttgggcagagcggaggggctggcagcgatagcaactctcctggaaacgtccagcctaattctgcccccagcgtcgaatcccaccccgtccttgaaaaactgaaggctgctcacagctacaacccgaaagagtttgagtggaatctgaaaagcgggcgtgtgttcatcatcaagagctactctgaggacgacatccaccgctccattaagtactccatctggtgtagcacagagcacggcaacaagcgcctggacagcgccttccgctgcatgagcagcaaggggcccgtctacctgctcttcagcgtcaatgggagtgggcatttttgtggggtggccgagatgaagtcccccgtggactacggcaccagtgccggggtctggtctcaggacaagtggaaggggaagtttgatgtccagtggatttttgttaaggatgtacccaataaccagctccggcacatcaggctggagaataacgacaacaaaccggtcacaaactcccgggacacccaggaggtgcccttagaaaaagccaagcaagtgctgaaaattatcagttcctacaagcacacaacctccatcttcgacgactttgctcactacgagaagcgccaggaggaggaggaggtggtgcgcaaggaacggcagagtcgaaacaaacaatgagggcgaaccagtttcttacatgttctaacgtttgactttgaaaacagtttaaaacacgtgtgcttggtcagctccagtgtgtcgtcccgtgcgggggttgagtgttgcatctttgcctttcttgtcgttgatttttgcccagatggatctgcatttatttgtactttttctatgtattataatcctgtagaagtcactaataaaggagtattttttttgtcagcttatcaatcagactgatctaatgtgaaatgtaagtatccttaaaaacaaagcatctattttggcagaaattgtgttcttaaattcagtcatttgatattctgtgagacttcatatttctcatccctttattgctttttagcaaacataagaaaccatgagtcattttgtcatttagagtattctgataaaatctcttgaaaatactgaaatcaaaaggttaatgattttttgttcattctgatttgtcattttattatctgttatcggtctaaagtgctaatttacccatttgatttttctgctagacagataacttttaatttttcaaatttggcagacacttttttttttttttgaaaatctttccttccagatctgttgcccactgaacagccacccgtccctcactgtcctggtgtccgattgggctggatggtgttggggcatgatgtgtggaggaactggaaggtgctttaggtctggttcagggtcgggcattctttgttgtttgcacatctttttaaattttacaccttttcttaagaattctaatgccgtcttaagtttttataccaataatgctgagctttaagtgtaggatctggtagtacagacagtgtgatggatgatgctgctggttgtaaatttcatcgtgtgtgtctaattttttttcctgttgaatgggtaaaaacaaaacaaaactttttttagaagatgaatttgctgtcatgttttgtggaatgagggaccgttgagctcactaccacctggagtttgagttgaagcatgaaaatggtgcccatgcctgacgctccagcgcctggatctgcacgtgcccttgtagaggatccttaccgtcctagagagcagacgctttctgaaaactacttgctccaaaagaccctctgagttaacgtttcagctgtatcattagacttgtatttagagcgtgtcacttcctctgaactgttactgcctgaatggagtcctggacgacattgggtttttcctctaggagaatacaagccttaataaacaatactatttagcaaaaaaaaaaaaaaaa

SEQ ID NO: 169 - DNA, 2182 bp, Homo sapiens
cgaggaggaaggagagaaaatggcgtccacggattacagtacctatagccaagctgcagcgcagcagggctacagtgcttacaccgcccagcccactcaaggatatgcacagaccacccaggcatatgggcaacaaagctatggaacctatggacagcccactgatgtcagctatacccaggctcagaccactgcaacctatgggcagaccgcctatgcaacttcttatggacagcctcccactggttatactactccaactgccccccaggcatacagccagcctgtccaggggtatggcactggtgcttatgataccaccactgctacagtcaccaccacccaggcctcctatgcagctcagtctgcatatggcactcagcctgcttatccagcctatgggcagcagccagcagccactgcacctacaagaccgcaggatggaaacaagcccactgagactagtcaacctcaatctagcacagggggttacaaccagcccagcctaggatatggacagagtaactacagttatccccaggtacctgggagctaccccatgcagccagtcactgcacctccatcctaccctcctaccagctattcctctacacagccgactagttatgatcagagcagttactctcagcagaacacctatgggcaaccgagcagctatggacagcagagtagctatggtcaacaaagcagctatgggcagcagcctcccactagttacccaccccaaactggatcctacagccaagctccaagtcaatatagccaacagagcagcagctacgggcagcagagttcattccgacaggaccaccccagtagcatgggtgtttatgggcaggagtctggaggattttccggaccaggagagaaccggagcatgagtggccctgataaccggggcaggggaagagggggatttgatcgtggaggcatgagcagaggtgggcggggaggaggacgcggtggaatgggcagcgctggagagcgaggtggcttcaataagcctggtggacccatggatgaaggaccagatcttgatctaggcccacctgtagatccagatgaagactctgacaacagtgcaatttatgtacaaggattaaatgacagtgtgactctagatgatctggcagacttctttaagcagtgtggggttgttaagatgaacaagagaactgggcaacccatgatccacatctacctggacaaggaaacaggaaagcccaaaggcgatgccacagtgtcctatgaagacccacccactgccaaggctgccgtggaatggtttgatgggaaagattttcaagggagcaaacttaaagtctcccttgctcggaagaagcctccaatgaacagtatgcggggtggtctgccaccccgtgagggcagaggcatgccaccaccactccgtggaggtccaggaggcccaggaggtcctgggggacccatgggtcgcatgggaggccgtggaggagatagaggaggcttccctccaagaggaccccggggttcccgagggaacccctctggaggaggaaacgtccagcaccgagctggagactggcagtgtcccaatccgggttgtggaaaccagaacttcgcctggagaacagagtgcaaccagtgtaaggccccaaagcctgaaggcttcctcccgccaccctttccgcccccgggtggtgatcgtggcagaggtggccctggtggcatgcggggaggaagaggtggcctcatggatcgtggtggtcccggtggaatgttcagaggtggccgtggtggagacagaggtggcttccgtggtggccggggcatggaccgaggtggctttggtggaggaagacgaggtggccctggggggccccctggacctttgatggaacagatgggaggaagaagaggaggacgtggaggacctggaaaaatggataaaggcgagcaccgtcaggagcgcagagatcggccctactagatgcagagaccccgcagagctgcattgactaccagatttattttttaaaccagaaaatgttttaaatttataattccatatttataatgttggccacaacattatgattattccttgtctgtactttagtatttttcaccatttgtgaagaaacattaaaacaagttaaatggtaaaaaaaaaaaaaaaaaa

SEQ ID NO: 170 - DNA, 931 bp, Artificial Sequence
  Description of Artificial Sequence: Synthetic polynucleotide
gtacaaaaaagcagaagggccgtcaaggcccaccatgtggcccttcccgagccgctctctcttcccacccccgactcaggcctggctccagacggtctcctcagaccctgaggcccagggctggggggcctggaacgagaccaaggagattctggggccagagggtggggaagggaaggaggagaaagaggaggaagaggatgcagaggaagaccaggatggggatgcaggctttctgctgtctctgctggagcaagagaacctggctgagtgcccattgcctgaccaggagctggaggccatcaagatgaaggtgtgtgccatggagcaggccgaggggacgccacggcctccaggagtgcagcaacaggccgaggaagaggagggcaccgcggccgggcagctgctgagccctgagaccgtgggctgccccctctctgggacccccgaggagaaggtggaggctgaccacagatccgtctacgtgggcaacgtggactacgggggctccgccgaggagctggaggcccacttcagccgctgtggggaggtccaccgagtcacgatcctgtgtgacaagttctctggacaccccaagggttatgcctacatagagtttgccaccaagggctccgtgcaggccgccgtggagctggaccagagcctcttccggggccgggtcatcaaggtgctgccgaaaagaaccaacttccctgggatcagctccacagaccgcgggggccttcgaggacacccaggctccaggggggcacccttcccccacagcggcctccagggcaggccccggctcagaccacaagggcagaaccggacgccggcggcactgacgccactatgggctcggccgctgccctgggtggtagtcagccacgtcatcaagtcaggcctcatgggcccagctttcttgtac

SEQ ID NO: 171 - DNA, 3137 bp, Homo sapiens
ctcgtctgccaccaccccgggcggcggcagcggcggctcgctcaacgccatgccgccgcccagccccgactcagagaacggcttctaccccgggctgccgtcgtccatgaacccggccttcttccctagcttctcgcccgtgtcgccgcacggctgcactgggctcagcgttccgccgcccgccatgaatatacctcaacagcagcccccgccgcccgcggcgccgcagcagccgcagagccggaggtcgcccgtcagcccgcagctccagcagcagcaccaggcggcggccgccgccttcctgcagcagaggaactcctataaccaccaccagcctcttctgaaacagtctccctggagcaaccatcagagcagtggctggggcactggaagtatgtcctggggagcaatgcatggcagagatcatcgtagaaccggaaacatgggaatcccaggaactatgaatcagatatctccattgaagaaaccgttttctggtaatgtcatagcaccaccgaaatttactcgctcaactccatcactgactccaaaatcttggattgaagataatgtgttcagaacagacaacaatagtaatacactcttacccttacaggtaagaatggatcgaagtagaatgtatgacagtttgaatatgcactctttggaaaattcccttatcgatattatgagagcagagcatgatcctcttaagggtcgattgagctatccacatccaggaactgacaatctgttgatgttaaatgcaaggagttatgggcgaagacgaggtcgttcttccctctttccaatagatgatggcttgcttgatgatggtcacagtgatcaagttggagttttaaattcacccacctgttattcagctcaccaaaatggagagcgaatagaacgcttctctcgaaaagtttttgttggtggtcttcctccagatattgatgaagatgaaataactgctagcttcagaagatttgggcctttggtagtagattggcctcataaagcagaaagcaagtcctattttccaccaaaaggctatgcatttcttctctttcaagaagagagctcagttcaggcactcattgatgcttgtattgaagaagatggaaaactctatctgtgtgtttctagccctactatcaaggacaaaccagttcaaatacgtccttggaatttaagtgatagtgattttgtaatggatggttctcagcctttggatccccgaaaaacaatttttgttggaggtgttcctaggccattaagggctgtggaacttgctatgatcatggaccggctgtatggtggagtttgttatgcaggaattgatacagatcctgagctaaaatacccaaaaggtgctgggcgagttgctttctccaatcagcagagctatattgctgccattagtgctcggtttgttcagcttcagcatggtgatattgataaacgtgtggaggtaaagccatatgtgctagatgaccagatgtgtgatgaatgccagggcgcacgctgtggtggaaaatttgctccctttttttgtgccaatgtcacttgcctgcagtattactgtgagttttgttgggcaaatatccactctcgtgctggacgtgagttccataagccattggtaaaggaaggtgctgatcgcccacgtcagatccacttccgctggaactaagaatagcaaactggcctctgtttaacaaggaaagaaagggtgcatgtggcttactgtgtctgaagatactgacatgcagaagaaataagtgcattcttctgcttttcaccccagctatcaatacatgcatctttatcagcagccaaaacactacaagcctcttgtttttcaccaaaaccctacatctcaggcttactaatttttgtgatattttcatgttcaaataaaatgtttttttgtattttctccaagttatttttatatgtaaagttaaaattagatatgagaatgttttgcgtaggggcaacacagtctgctgctatatagtgggggaagcgtgcacttatttctaaacatgggtttttaacttcaagatctgccccagtaatttaccaaaggtagcaaaataatagtgaagatggaatatgtctgctacaaatgcttatttttattgttgctattttcagtgtatacataaactaaaaattagggttgatttttttgctctccattttgacttgcaagaaataatacctcaagataatctgatttattagctatttttaaacatttttaatcacaagctgtattagctttgctgctatataggtgttatgtgtaaatgccacctattaatacgggactgaaaacgttagagacacactgcattgcagataaaatgcaggcagcacaatatggcctaaactgccatagttttagaatgtgaaaaaaatgcatgtttacttacctgtatacaccatatgcatgcactagaattattaactaacgaggtgaggtattgcaaatgttcaaaaaagctctcttgaatctaggtagcatgaacaaattataaaatttgtttaaaaaagcaaacttgcatgcattattgtgacttcaagtttaaaaaatcgtcttacatgtgtacaatatgcaaattagttttagattagagagtgcagccattttgtgatctggtcagtagtggaattcgattttatgcagactggatgtaatatttgtaatccctgtgcaattttgtgacgtgcggttctaattcatgtgcagtgatatagtatagataaaagaatgagtaaaagaaaatacaagaattctaaagaaagttggttttagcccctttgatagtccatggttaagacatcctttataaaccaaagatggccagcacactgctaaccagtcaccaaatgtaagacccataagaaacccatatttaaaaatctgaattttttagaagaatgcaaaactttagtaaaccctaagtaaagtcaaaatggagaaggggaaatatacagatggctagttgcataaaattaaattttacctttataagacaatggtgaaatctggcttgaacttgcttatgtgtttaacctataaatattggggtcttctgtctaaactggggtcactgttgcatggt

SEQ ID NO: 172 - DNA, 2300 bp, Homo sapiens
ggccggcctctcccttcccggggttcttcgcgccgggccccttccgcgtgggtgagtgaatgtgagagtcagcgctcgcgccgcgcgcgccgcccgcctccgctgttcggcgctctgctttaggcggtggggggcgggcgcgcgcgtaaaagcatagagacgggcattgagctcttgggctagagcgtcgccgagtcggagccggagcctgagccgcgcgctgtgtctccgctgcgtccgccgaggcccccgagtgtcagggacaaaagcctccgcctgctcccgcagccggggctcatctgccgccgccgccgcgctgaggagagttcgccgccgtcgccgcccgtgaggatctgagagccatgtcggccagcagcctcttggagcagagaccaaaaggtcaaggaaacaaagtacaaaatggatctgtacatcaaaaggatggattaaacgatgatgattttgaaccttacttgagtccacaggcaaggcccaataatgcatatactgccatgtcagattcctacttacccagttactacagtccctccattggcttctcctattctttgggtgaagctgcttggtctacggggggtgacacagccatgccctacttaacttcttatggacagctgagcaacggagagccccacttcctaccagatgcaatgtttgggcaaccaggagccctaggtagcactccatttcttggtcagcatggttttaatttctttcccagtgggattgacttctcagcatggggaaataacagttctcagggacagtctactcagagctctggatatagtagcaattatgcttatgcacctagctccttaggtggagccatgattgatggacagtcagcttttgccaatgagaccctcaataaggctcctggcatgaatactatagaccaagggatggcagcactgaagttgggtagcacagaagttgcaagcaatgttccaaaagttgtaggttctgctgttggtagcgggtccattactagtaacatcgtggcttccaatagtttgcctccagccaccattgctcctccaaaaccagcatcttgggctgatattgctagcaagcctgcaaaacagcaacctaaactgaagaccaagaatggcattgcagggtcaagtcttccgccacccccgataaagcataacatggatattggaacttgggataacaagggtcccgttgcaaaagccccctcacaggctttggttcagaatataggtcagccaacccaggggtctcctcagcctgtaggtcagcaggctaacaatagcccaccagtggctcaggcatcagtagggcaacagacacagccattgcctccacctccaccacagcctgcccagctttcagtccagcaacaggcagctcagccaacccgctgggtagcacctcggaaccgtggcagtgggttcggtcataatggggtggatggtaatggagtaggacagtctcaggctggttctggatctactccttcagaaccccacccagtgttggagaagcttcggtccattaataactataaccccaaagattttgactggaatctgaaacatggccgggttttcatcattaagagctactctgaggacgatattcaccgttccattaagtataatatttggtgcagcacagagcatggtaacaagagactggatgctgcttatcgttccatgaacgggaaaggccccgtttacttacttttcagtgtcaacggcagtggacacttctgtggcgtggcagaaatgaaatctgctgtggactacaacacatgtgcaggtgtgtggtcccaggacaaatggaagggtcgttttgatgtcaggtggatttttgtgaaggacgttcccaatagccaactgcgacacattcgcctagagaacaacgagaataaaccagtgaccaactctagggacactcaggaagtgcctctggaaaaggctaagcaggtgttgaaaattatagccagctacaagcacaccacttccatttttgatgacttctcacactatgagaaacgccaagaggaagaagaaagtgttaaaaaggaacgtcaaggtcgtgggaaataaaaggcagttctacacagactgcagcaacggttgcatctgcatatcctaagaggaaaaaatgaccttcaagagaattaggacttttttcttaatttcactgacttcagagacgattgcagacttgcagtttaagtattggaatttcacaaaagacataggacttaactggaaaatgaaaaaaaaaaaaaaaaaaaaaaa

SEQ ID NO: 173 - DNA, 3634 bp, Homo sapiens
aattccagtatctgggatggatctgaagttctgaggcgaatccgaggaccactgcttgctcaggaaatgcctacagtgtctgtattagaatatgctttgcctcagaggcccccccagggtccagaagatgatcgggacctttctgaacgagcattaccaaggcggtcaacttcacctatcattggcagtcctcctgttagagctgtccccataggcaccccacctaaacagatggctgtacccagcttcacccaacagattctgtgtccgaagcctgtccatgttcggcccccaatgccacctcgttatcctgctccctatggtgagaggatgtctccaaaccagctctgcagtgtcccgaactcttccctcctgggtcacccttttcctcctagtgttcctcctgttctcagccccctccagagagcacagcttcttggaggagcacagctacagcctggacggatgtctcccagccagtttgcacgggtccctggatttgttggtagtccacttgctgccatgaatcccaagttgctacaagggcgagttgggcagatgcttcccccagcaccaggcttccgtgccttctttagtgctccaccctccgctacaccacctccacagcagcaccctcctggcccaggaccccacctgcaaaacctaagatctcaggccccaatgtttagaccggacacaactcacctccatccacagcaccgtcgactcttgcatcagagacagcaacagaatagaagtcagcatcggaatctcaatggtgcgggagatagaggaagtcaccggagcagtcatcaagatcatctccgaaaggatccatatgccaatctcatgttgcagcgggaaaaggattgggtctctaaaatccagatgatgcaactgcaaagcactgatccctacctggatgatttttattaccagaattactttgaaaaactggagaaactgtcagctgctgaagaaatacaaggtgatggccctaagaaggagcgcaccaagcttatcacccctcaggtggccaaactggagcacgcctataagccagtgcaatttgagggctctttgggaaagcttaccgtttctagtgtgaataatccccgaaaaatgattgatgctgttgtgacatctcggagtgaggatgatgagacaaaagaaaaacaagttcgagacaagaggagaaaaacccttgttataattgagaaaacctacagcttactccttgatgtggaggactatgaaagacgttatctcctaagtctggaagaagagcgacctgccctaatggatgacagaaagcacaaaatttgtagcatgtatgacaacttaagggggaaattgcctggacaagagaggcctagtgatgaccactttgtacagatcatgtgtatccgaaaagggaagagaatggttgcccgtattcttcctttcctctccacagagcaagcagctgacattctcatgacaacagccaggaacctccctttccttatcaagaaggatgcacaagatgaggtgctgccatgcttactgagtcccttctctctccttctctatcatcttccatcagtgagtatcaccagccttttgcgacagctaatgaacctacctcaaagtgcagctacaccagcactctccaatcctcacctcactgctgtgctccagaacaagtttggcctgtcactgctcctcatcctcctgagccgtggtgaagacctacagagttcagaccctgctacagaatcaacacaaaataatcagtggacggaggtgatgttcatggcaacacgagaacttctgcggattccccaagcagccctggccaagccaatctctatacctacaaacctagtgtccctcttttctcgctatgttgaccggcagaaactgaacttgctggagacaaaactgcagctagttcaggggatacgataaaagatctccaaatgtgtcctgtacctccttttggctgccacctgcactgctgccatcaccaatggagtgtttttaatgagggaaggaaggtagctttttccccaaagcaaagtcttgtgggatcgattcctgtttacaggggttgtctctctaaatgtcagatatttccccactgctctatgaaatttggctgggtgatacttctgctggtttctttaccttctgtgttacagttctgcatgtcctacttttactcagttctgttttgcattttctttgccctagagacacaagtgtaatctctccctttatccctccactactccacctcagagtagattgtagcctgccaaaggattccttccctcatcctattgaagttgttttttcattgccccatattaatatgactatagaagagccaattaagtagaaatcaagatatacacacacacatagatacacacacacacaccccatacatgtatttatgtggtcttcagagggtccttaaagaatgaattttagattgaaaaatatttagttgtctcattacctcttctaaacacaaaccagctgatgtattttaatctgtttctgttctatcttgtaattaatttggtgggttctacttgttttaacataaataaagagtatgcagcacgtttaataaaatcagaactcttaattggcttatgcccaggtctaggctgagaagtcctttttcttcttcccacctttatttccttagtttctgtccaccttaatcgaaacaacacatggttatgtctttttcctgctacaactacagggtacttgagcctttcccctcaagtgcattcgaagtcacccaggatgatcctcactagtagcctgctttggcagtgtggctttttgcacacttgccctgtcttcctgagactacttcagtaagccatgcttccttcttccccacttttatttggtgtcatgaatagaaacttccaaatgtaaccatggaagctaagtttggcctgctttgctttttagtctccacaccatgggcagaactgctgtctttactacttcatctcacccaagtcccgttcccaggcagccaggggcctgggtttgaataattgcagggccagcctgccatgatctttctcacttactcctctcccattcagcaatcaaccagactaaggagttttgatccctagtgattacagccctgaagaaaattaaatctgaattaattttacatggccttcgtgatctttctgctgttcttactttttcgaatgtagttggggggtgggagggacaggttatggtatttaaagagaataaacattttgcacatacatgtattgtacaacagtaagatcctctgttaaaaccagctgtcctgttctccatctccatttcttcccatgctgtaaccccaggctccaccagctgttccccagtgatgttacctagcttccctctaccgttgtctactgaccatttccactacatgcctttcctaccttcccttcacaaccaatcaagtgaatacttgattattatctcttccttactgtgctttatcttttttgtttggattggttctaattaatgaaaataaaagtttctaaatttacatttttatagggtattgtaaataaaaacaaattgtatacttaaaaaaaaaaaaaaa

SEQ ID NO: 174 - DNA, 3224 bp, Homo sapiens
atccgaggaccactgcttgctcaggaaatgcctacagtgtctgtattagaatatgctttgcctcagaggcccccccagggtccagaagatgatcgggacctttctgaacgagcattaccaaggcggtcaacttcacctatcattggcagtcctcctgttagagctgtccccataggcaccccacctaaacagatggctgtacccagcttcacccaacagattctgtgtccgaagcctgtccatgttcggcccccaatgccacctcgttatcctgctccctatggtgagaggatgtctccaaaccagctctgcagtgtcccgaactcttccctcctgggtcacccttttcctcctagtgttcctcctgttctcagccccctccagagagcacagcttcttggaggagcacagctacagcctggacggatgtctcccagccagtttgcacgggtccctggatttgttggtagtccacttgctgccatgaatcccaagttgctacaagggcgagttgggcagatgcttcccccagcaccaggcttccgtgccttctttagtgctccaccctccgctacaccacctccacagcagcaccctcctggcccaggaccccacctgcaaaacctaagatctcaggccccaatgtttagaccggacacaactcacctccatccacagcaccgtcgactcttgcatcagagacagcaacagaatagaagtcagcatcggaatctcaatggtgcgggagatagaggaagtcaccggagcagtcatcaagatcatctccgaaaggatccatatgccaatctcatgttgcagcgggaaaaggattgggtctctaaaatccagatgatgcaactgcaaagcactgatccctacctggatgatttttattaccagaattactttgaaaaactggagaaactgtcagctgctgaagaaatacaaggtgatggccctaagaaggagcgcaccaagcttatcacccctcaggtggccaaactggagcacgcctataagccagtgcaatttgagggctctttgggaaagcttaccgtttctagtgtgaataatccccgaaaaatgattgatgctgttgtgacatctcggagtgaggatgatgagacaaaagaaaaacaagttcgagacaagaggagaaaaacccttgttataattgagaaaacctacagcttactccttgatgtggaggactatgaaagacgttatctcctaagtctggaagaagagcgacctgccctaatggatgacagaaagcacaaaatttgtagcatgtatgacaacttaagggggaaattgcctggacaagagaggcctagtgatgaccactttgtacagatcatgtgtatccgaaaagggaagagaatggttgcccgtattcttcctttcctctccacagagcaagcagctgacattctcatgacaacagccaggaacctccctttccttatcaagaaggatgcacaagatgaggtgctgccatgcttactgagtcccttctctctccttctctatcatcttccatcagtgagtatcaccagccttttgcgacagctaatgaacctacctcaaagtgcagctacaccagcactctccaatcctcacctcactgctgtgctccagaacaagtttggcctgtcactgctcctcatcctcctgagccgtggtgaagacctacagagttcagaccctgctacagaatcaacacaaaataatcagtggacggaggtgatgttcatggcaacacgagaacttctgcggattccccaagcagccctggccaagccaatctctatacctacaaacctagtgtccctcttttctcgctatgttgaccggcagaaactgaacttgctggagacaaaactgcagctagttcaggggatacgataaaagatctccaaatgtgtcctgtacctccttttggctgccacctgcactgctgccatcaccaatggagtgtttttaatgagggaaggaaggtagctttttccccaaagcaaagtcttgtgggatcgattcctgtttacaggggttgtctctctaaatgtcagatatttccccactgctctatgaaatttggctgggtgatacttctgctggtttctttaccttctgtgttacagttctgcatgtcctacttttactcagttctgttttgcattttctttgccctagagacacaagtgtaatctctccctttatccctccactactccacctcagagtagattgtagcctgccaaaggattccttccctcatcctattgaagttgttttttcattgccccatattaatatgactatagaagagccaattaagtagaaatcaagatatacacacacacatagatacacacacacacaccccatacatgtatttatgtggtcttcagagggtccttaaagaatgaattttagattgaaaaatatttagttgtctcattacctcttctaaacacaaaccagctgatgtattttaatctgtttctgttctatcttgtaattaatttggtgggttctacttgttttaacataaataaagagtatgcagcacgtttaataaaatcagaactcttaattggcttatgcccaggtctaggctgagaagtcctttttcttcttcccacctttatttccttagtttctgtccaccttaatcgaaacaacacatggttatgtctttttcctgctacaactacagggtacttgagcctttcccctcaagtgcattcgaagtcacccaggatgatcctcactagtagcctgctttggcagtgtggctttttgcacacttgccctgtcttcctgagactacttcagtaagccatgcttccttcttccccacttttatttggtgtcatgaatagaaacttccaaatgtaaccatggaagctaagtttggcctgctttgctttttagtctccacaccatgggcagaactgctgtctttactacttcatctcacccaagtcccgttcccaggcagccaggggcctgggtttgaataattgcagggccagcctgccatgatctttctcacttactcctctcccattcagcaatcaaccagactaaggagttttgatccctagtgattacagccctgaagaaaattaaatctgaattaattttacatggccttcgtgatctttctgctgttcttactttttcgaatgtagttggggggtgggagggacaggtta

SEQ ID NO: 175 - DNA, 2025 bp, Homo sapiens
cgacgctgagatgggggcggcggcggcggaagcggatcgcactctctttgtgggcaaccttgaaacgaaagtgaccgaggagctccttttcgagcttttccaccaggctgggccagtaataaaggtgaaaattccaaaagataaggatggtaaaccaaagcagtttgcgtttgtgaatttcaaacatgaagtgtctgttccttatgcaatgaatctacttaatggaatcaaactttatggaaggcctatcaaaattcaatttagatcaggaagtagtcatgccccacaagatgtcagtttgtcatatccccaacatcatgttggaaattcaagccctacctccacatctcctagcaggtacgaaaggactatggataacatgacttcatcagcacagataattcagagatctttctcttctccagaaaattttcagagacaagcagtgatgaacagtgctttgagacaaatgtcatatggtggaaaatttggttcttcacctctggatcaatcaggattttcaccatcagttcaatcacacagtcatagtttcaatcagtcttcaagctcccagtggcgccaaggtacaccatcatcacagcgtaaagtcagaatgaattcttatccctacctagcagatagacattatagccgggaacagcgttacactgatcatgggtctgaccatcattacagaggaaagagagatgatttcttctatgaagacaggaatcatgatgactggagccatgactatgataacagaagagacagtagtagagatggaaaatggcgctcatctcgacactaacacatgttaaaaggacattgtttttatagggtcattttaggccctttgactaagttgatatggaaatattttgttgaaaaactgtacagagcagctttacaagttgtcacatttctttataaatttttttaaagctacagtttaatacaaaatgaattgcggttttattacattaataacctttcacctcagggttttatgaagaggaaagggttttatgcaaaagaaagtgctacaattcctaatcattttagacactttaggagggggtgaagttgtatgataaagcagatattttaattatttgttatctttttgtattgcaagaaatttcttgctagtgaatcaagaaaacatccaggttgacagtctaaaatggctactggtattttagttaattcaaaaatgaaacttttcagtgattcactttactaacattctatttgagaaggcttattggtaaagtttggggataaaggcattgcttaacttcttatataatttaggtataaattctgtgacatgctcttgagctttaccctagttgaacatacatgtgtagatttacacatactgtttcattctaaaatttagaaattgttcattaaatcccatttgaggtataagtcactcaggaagttaaaatatctctacacgtatatttttacattaaaaatacagtgttagcataaatccccttttcaggaagaacaaaaatgtcagtgcatagttagataaaatggtaaaatgttttactgaaagcatacttttttggaaaatagattcatgaagcctttaagtgctgcttctgtcagtcaaacgttaaaaactttaacattttcaaagtgcccagactgtgtacaaagacacatgtaatggagattgtacaggttgtttttttgtttgaacctttgaaagagtttaatcttaacgttttctaattttaaaattttaaaatcttgtttaacaaaagcttgtattaagatactgttttcatttcattacagaattgtttataaaagttcatttgttgaaaaataaggatcctttttaataccacagcatttgtactgttcctttttaatatactgaaaatataaaaggaaaaaaaaaaaaaaaaaaaaaaaaaaaaaaaaaaaaaaaaaaaaaaaaaaaaaaaaaaaaaaaaaaaaaaaaaaaaaaaaaaaaaaaaaaaaaaaaaaaaaaaaaaaaaa

SEQ ID NO: 176 - DNA, 1903 bp, Homo sapiens
gctcaagcccggccacgccgccccaagggctcctcccgacctcccggcctgccgctccggccactgcgggatccagaaacatgtcgaccacacttctgtccgccttctacgatgtcgacttcttgtgcaagacagagaaatccctggccaacctcaacctgaacaacatgctggacaagaaggcggtggggacgcctgtggccgccgcccccagctcgggcttcgcgccgggattcctccgacggcactcggccagcaacctgcatgcactcgcccaccccgcgcccagccccggcagctgctcgcccaagttcccgggcgccgctaacggcagcagctgcggcagcgcggcggccggcggtccgacctcctacggcacccttaaggagccgtcggggggcggcggcacagccctgctcaacaaggagaacaaattccgggaccgctcgtttagcgagaacggcgatcgcagccagcacctcctgcacctgcagcagcagcagaaggggggcggcggctcccagatcaactccacgcgctacaagaccgagctgtgccggcccttcgaggagagcggcacgtgcaagtacggcgaaaagtgccagttcgcgcatggcttccacgagctgcgcagcctgactcgccatccgaagtacaagaccgagctgtgccgcacctttcataccatcggcttctgcccctatgggccgcgctgccacttcatccacaacgcggacgagcggcggcccgcgccgtcggggggcgcctccggggacctgcgtgcctttggcacgcgcgatgcgttgcacctgggcttcccgcgggagccgcggcccaagttgcaccacagcctcagcttctcgggcttcccgtcgggccaccatcagcccccgggcggcctcgagtcgccgctgctgctcgacagccccacgtcgcgcacgccgccgccgccctcctgctcttcggcctcgtcctgctcctcctccgcctcctcctgttcctcggcctccgcggcctccacgccctcgggcgccccgacatgctgcgcctccgcggcggccgcggctgcggccgctctgctgtacggcaccgggggcgccgaggacctgctggcgccgggggccccgtgcgcggcctgctcgtcggcctcgtgcgccaacaacgccttcgccttcggtccggagctcagcagcctcatcacgccgctcgccatccagacccacaactttgccgccgtggccgccgccgcctactaccgcagtcagcagcagcagcagcagcagcagcagcagggcctggcgccccccgcgcagccgccggcgccgcccagcgcgaccctccccgccggggccgccgcacctccctcgccgcccttcagcttccagctgccgcgccgcctgtccgactcgcccgtgttcgacgcgccccccagccccccggactcgctgtcggaccgcgacagctacctaagcggctccctgagctccggcagcctcagcggctctgagtctcccagcctcgaccctggccgccgcctgccaatcttcagccgcctctccatctccgacgactgaggcaagagggcgccagtgaggaggaagggaaggcggttcagagatgttggaggacacccctcgccatctcgcccttgctgggggcacgggagtggggggggtgacatgggccctaggcagactgcaagcccgaccgagcacttggactcgaactctgtgccgggaggggcccccacccctcctttttcggtttcctcttgtctttttttttttatttttattacgaagtttcattctttttgagcaaaaaagtcgaactttttctgttgaacaaaatattcacaacagggcagttgtgatacgaatagaacaaaaaaaaaaaaaaaaaa

SEQ ID NO: 177 - DNA, 3572 bp, Homo sapiens
ggggagcccgtttgttccgcccgtgtcgagcctggagccagaacctgtgaagagcggaagggccaagggacgtcttctccacgccgctccgactccaggggagccgtggcctcctctccgccctagcgctgagaaccgtgggtaccgatggatgtggccgagagccctgaacgggatcctcactctccagaggatgaagagcagccacagggactctcggacgatgacattctgagggacagcgggtccgatcaggatttggacggggcgggggtgagggcttctgatctggaggatgaggaaagtgcagccagggggccgagccaggaggaggaagataatcactccgacgaggaggaccgggcaagtgagcctaaatcccaagaccaggactcagaggtgaatgagctgagccggggcccgaccagctccccctgcgaggaggagggggacgaaggggaggaagaccggacaagcgaccttagggatgaggcctcctcagtcaccagggagctggatgagcatgagctagactacgatgaggaggttcctgaggagccagctcccgccgtccaggaggacgaggctgagaaagcgggggctgaggatgatgaggagaagggcgaaggcactcccagggaggaggggaaggctggtgttcagagtgtgggagaaaaggaatccctggaggctgccaaggagaaaaagaaagaggacgatgatggagaaatcgatgatggggaaatagacgatgatgacctggaagaaggtgaagtgaaggaccccagtgacaggaaggtgaggcctcgtcccacctgccggttcttcatgaaagggaactgtacctggggaatgaattgtaggtttatacaccctggagtgaacgacaaggggaactactccctaatcaccaaagccgaccccttcccgcctaatggtgccccgcctctcggacctcacccgctgatgcccgccaacccttggggtgggccggtagttgatgaaattttgcctccaccccctccagagcccccaacagagagtgcctgggaacgaggactccggcatgcaaaggaggttttaaaaaaagcaactattcgaaaagaacaggagcctgattttgaagagaaaaggtttacggtgaccattggcgaagacgaacgggaatttgacaaagaaaatgaagtttttcgagattggaattctcggatcccgagagatgtcagagacacagtactcgagccttacgcagacccttattatgactatgaaattgagcggttttggcgtggcggacagtatgagaatttcagggtgcagtatacagaaacagagccgtatcataattaccgagaaagggagcgggagcgagagagagagaacagacagcgcgagcgcgagcgggagcgggagcgggaccgagagcgggagcgccggcagagggagcgcgagcgagagcgggagcacgagcgcgacaaggagcggcagcggaggaaggaggagtgggagcgtgagcgagccaagcgggacgagaaggaccggcagcaccgtgaccgcgaccgggagaaggagcgggagaaggagaaggggaagcccaagccccgctccccgcagccgccaagccgccaagctgagccaccaaagaaggaggctgccaccacggggccgcaggtgaagagagcagatgagtggaaggacccttggcgccgatccaagtctcccaagaagaaactcggggtgtcggtctccccgagccgggctcgaaggcgtcggaaaacatcagcctcgtcagcctctgcctctaattcctccaggtcgtcttcgcggtcatcgtcctactctggctccggctcctcccggtcgcgatcccggtcttcatcctacagctcctactccagccgctcttccagacacagctcgttctcaggaagccggtccaggtcccggtccttctcttcgtccccgtccccgtccccaacaccttccccacatagaccttccatcagaaccaagggagagccggccccgccgcccgggaaagcaggagagaagtcagtgaagaagccggccccgcctccagccccaccacaggccaccaaaaccactgctcctgtccccgagcccaccaagccaggagaccctcgggaagccaggaggaaggagcggccagccaggaccccccccaggaggcggacgctaagcggcagcggcagtggcagtggtagcagctatagtggttccagctcccgatccaggtccctgagcgtgagcagcgtctcctcagtgtccagtgctacgtcgagcagcagctctgcacacagcgtggactcggaggacatgtacgcagacctggctagccccgtgtcctcagccagctctcggtccccggccccagcccagaccaggaaggagaaaggaaaatctaagaaagaagacggtgttaaagaggaaaagcggaaaagggattcgtccacacaaccacccaaatctgcaaaacctccagcaggggggaagtcctcccagcagccctcgacaccccagcaggcaccccccgggcagccccagcagggcacatttgtggcccacaaggagatcaagttgacactgttgaataaggcggctgataaaggaagcaggaagcgctatgaaccatcagacaaggacaggcagagccctcctccagccaagcggcccaacacatccccagaccgaggttctcgggaccggaagtcaggtgggagactgggctccccgaagccagagcggcagagaggccagaactccaaagcccctgcagccccggctgacaggaagcgccagctgtcaccccagtccaagagctccagcaaggtcacgagcgtgcccggcaaagcctcggatcccggcgccgccagcaccaaatcagggaaggccagcacgctgtctcggcgggaggagctgctgaaacagctgaaggccgtggaggatgctattgcacgcaagcgggccaagatccccgggaaagcataggccgtgccccgaccggactggacgcatttttatacatagggtaagcgcagccattttggattttgcagttaatgtcttattttggctgtgattctttttaaaaagtaaaaaagaaaaaaaagtttctcagctggaaaagaagccacacaggaaatgacaacgacgctgaatcccagcctccctccccagagcagaagtcccgcaggacagacagacacagacagcgctagtgaccagcacggttctcatgtaaattacaagccccagccgccagccccgccttctcttcctcctcctccgtcttcttccctggccctggtcaggcctgtggagccccagctctgggtccctagcccgggtccaggcagccaggctccctcctgagctgagaaacggaacctcgcgaaccactggtggcacatccttctcctcccccgcccctgatcacccgcccccggatcagaaatatatctatattctcgactaaagtctcatcaggaaatatttcctgtcttttattttaagcatcaaattgttttagttgatttaaaaaaaaaaaaaaa

SEQ ID NO: 178 - DNA, 1781 bp, Homo sapiens
gtcgccatcttggatccgcgggacaagaaaattcatgcgagggagacgtggtgggcggtccttcctgtgacacgacccttgagtgacagttctatttgattgcctccggtactgtgaggaaaggacacgactctatggtgaggactgatggacatacattatctgagaaaagaaactaccaggtgacaaacagcatgtttggtgcttcaagaaagaagtttgtagagggggtcgacagtgactaccatgacgaaaacatgtactacagccagtcttctatgtttccacatcggtcagaaaaagatatgctggcatcaccatctacatcaggtcagctgtctcagtttggggcaagtttatacgggcaacaaagtgcactaggccttccaatgagggggatgagcaacaatacccctcagttaaatcgcagcttatcacaaggcactcagttaccgagccacgtcacgccaacaacaggggtaccaacaatgtcacttcacacgcctccatctccaagcaggggtattttgcctatgaatcctaggaatatgatgaaccactcccaggttggtcagggcattggaattcctagcaggacaaatagcatgagcagttcagggttaggtagccccaacagaagctcgccaagcataatatgtatgccaaagcagcagccttctcgacagccttttactgtgaacagtatgtctggatttggaatgaacaggaatcaggcatttggaatgaataactccttatcaagtaacatttttaatggaacagacggaagtgaaaatgtgacaggattggacctttcagatttcccagcattagcagaccgaaacaggagggaaggaagtggtaacccaactccattaataaaccccttggctggaagagctccttatgttggaatggtaacaaaaccagcaaatgaacaatcccaggacttctcaatacacaatgaagattttccagcattaccaggctccagctataaagatccaacatcaagtaatgatgacagtaaatctaatttgaatacatctggcaagacaacttcaagtacagatggacccaaattccctggagataaaagttcaacaacacaaaataataaccagcagaaaaaagggatccaggtgttacctgatggtcgggttactaacattcctcaagggatggtgacggaccaatttggaatgattggcctgttaacatttatcagggcagcagagacagacccaggaatggtacatcttgcattaggaagtgacttaacaacattaggcctcaatctgaactctcctgaaaatctctaccccaaatttgcgtcaccctgggcatcttcaccttgtcgacctcaagacatagacttccatgttccatctgagtacttaacgaacattcacattagggataagctggctgcaataaaacttggccgatatggtgaagaccttctcttctatctctattacatgaatggaggagacgtattacaacttttagctgcagtggagctttttaaccgtgattggagataccacaaagaagaacgagtatggattaccagggcaccaggcatggagccaacaatgaaaaccaatacctatgagaggggaacatattacttctttgactgtcttaactggaggaaagtagctaaggagttccatctggaatatgacaaattagaagaacggcctcacctgccatccaccttcaactacaaccctgctcagcaagccttctaaaaaaaaaaaaaaaaaaaaaaaaaa

SEQ ID NO: 179 - DNA, 2619 bp, Homo sapiens
acgggcccgagtcgcgaggcttgggattgacgtgagtgaattcagatataactcaagcttgttagagggctttttaaaaataaaaagttgattccgtgcaagagagcaagttactgctgcttaccgttcagagacttacaggtgcttgcctgcattgcaataaaggactcatttattgagcaagacttatatttatctcttcattttggagagcctaataaactgttattacagtttctctactgactttcaaaagttttgaagtttgaaagacctttgcaattaaaacagcatgagcacggccagaacagagaaccctgttataatgggtctgtccagtcaaaatggtcagctgagaggccctgtgaaacccactggtggccctggaggagggggcacacagacacagcaacagatgaaccagctgaaaaacaccaacacaatcaataatggcactcagcagcaagcacagagtatgaccaccactattaaacctggtgatgactggaaaaagactttaaaactccctccaaaggatctaagaatcaaaacttcggatgtgacctccacaaaaggaaatgagtttgaagattactgtttgaaacgggagttactgatgggaatttttgaaatgggctgggaaaagccatctcctattcaggaggagagcattcccattgctttatctggtagggatatcttagctagagcaaaaaatggaacaggcaagagcggtgcctacctcattcccttacttgaacggctagacctgaagaaggacaatatacaagcaatggtgattgttcccactagagaacttgctctacaggtcagtcaaatttgcatccaggtcagcaaacacatgggaggggccaaagtgatggcaaccacaggaggaaccaatttacgagatgacataatgaggcttgatgatacagtgcacgtggtgattgctacccctgggagaatcctggatcttattaagaaaggagtagcaaaggttgatcatgtccagatgatagtattggatgaggcagataagttgctgtcacaggattttgtgcagataatggaggatattattctcacgctacctaaaaacaggcagattttactatattccgctactttccctcttagtgtacagaagttcatgaattcccatttgcagaaaccctatgagattaacctgatggaggaactaactctgaagggagtaacccagtactacgcatatgtaactgagcgccaaaaagtacactgcctcaacacacttttctccaggcttcagataaaccagtcgatcattttctgtaactcctctcagcgagttgaattgctagccaagaagatttctcaactgggttattcttgcttctatattcatgctaaaatgaggcaggaacatcgaaatcgtgtatttcatgatttccgaaatggcttatgccgcaatcttgtttgcactgatctgtttacccgaggtattgatatacaagctgtgaatgtggtaataaactttgatttcccaaagctggcagagacctatctccatcgtattggaagatcaggtcgctttggtcatcttggcttagccatcaacttgatcacatatgatgatcgcttcaacctgaaaagtattgaggagcagctgggaacagaaattaaacctattccgagcaacattgataagagcctgtatgtggcagaataccacagcgagcctgtagaagatgagaaaccttaacaagcatgctttgacaaattacaaaaggctcgtttggatctgtgacacatcgttttggggggaatgctcttctctttgtgggtttttcatcttttattttggaactatgaagacttaaaagagctcagacattttctttttttaactggtgaagagaaaaaggctgaaaagaaggaatataccttttttgttccacttgtttgcactgtgtgctgactgaacattagttgcactaactgctggtttttaaaaaatgttttctggggaaaggggacaaggaaggaaaagaaagaagagaaggggagaaaccctaaaaagagaagaatcttaatgaacacacaagcttgtcaatgatttcaaaattctccaacagctgactctcgtgcatttcaacttctccctgattcctcatccgttttttaagcctgaagagcttattacttatttgtgcgaagtgccttatgctatgagaccattcagaatatcatcttttagacacagcccgaggaatcaacaatagtaactctttctttccgttttttttctttttcttttaaaaaatgtctttttattttggtttcaggttgaagtctcttccctttctacccagtactcgagcccagggctagaagttgaaactcactagtaatgttaaacaccattttttttttctttttggggaggagttgatatgcaactgcagttcatccgcactgtaaatacatgtatttaaaaaaacaatcccaagtaaaaatttcttctgggctgagttcttctgtaaagagatgaacgcaatgccaataaaattgaacaagaacaatgataaaaaaaaaaaaaaaaaaaaaaaaaaaaaaaaaaaaaaaaaaaaaaaaaaa

SEQ ID NO: 180 - DNA, 2687 bp, Homo sapiens
gtcaggacgtgcgaaaagcgacggcgcagcacggtgcggcgcagctcctgctcgcctttcccttcgctgggcgagaggtgtctatggggcacccgctgccgccgccgctaccgccaccgccaccgccaccgccgccgagtgctgtctctatggcgaggaggaggaggaggagcgcgagctcagcgacacaaacaggtacataaataaaggataaaatattttatgaaacaaatcttcaatcaagtataacattttgatgcttggcatctagactcccttgtgccctcactatgccagcggcaactgtagatcatagccaaagaatttgtgaagtttgggcttgcaacttggatgaagagatgaagaaaattcgtcaagttatccgaaaatataattacgttgctatggacaccgagtttccaggtgtggttgcaagacccattggagaattcaggagcaatgctgactatcaataccaactattgcggtgtaatgtagacttgttaaagataattcagctaggactgacatttatgaatgagcaaggagaataccctccaggaacttcaacttggcagtttaattttaaatttaatttgacggaggacatgtatgcccaggactctatagagctactaacaacatctggtatccagtttaaaaaacatgaggaggaaggaattgaaacccagtactttgcagaacttcttatgacttctggagtggtcctctgtgaaggggtcaaatggttgtcatttcatagcggttacgactttggctacttaatcaaaatcctaaccaactctaacttgcctgaagaagaacttgacttctttgagatccttcgattgttttttcctgtcatttatgatgtgaagtacctcatgaagagctgcaaaaatctcaaaggtggattacaggaggtggcagaacagttagagctggaacggataggaccacaacatcaggcaggatctgattcattgctcacaggaatggcctttttcaaaatgagagaaatgttctttgaagatcatattgatgatgccaaatattgtggtcatttgtatggccttggttctggttcatcctatgtacagaatggcacagggaatgcatatgaagaggaagccaacaagcagtcatgacatgaaatagtccttttatttttatttcgagctacacacatgcttgtatataggttttatctctggttgaatccctcgaacaatagacagtacctttcccccccctttcatggcccattttattgtctgcctttcagtactaagtatgaccgttcctatctcagatcttaataaaaagaaaaaaaaaaacgcattcaggttaaatttggccttaatttaatatacttgttagcaagcgtgtgtgacagagagtggggaaagctacatcattgaatattttgataaactttaccgacttgagtttggtttatttttcccttttcctaaattaactagcactgactgtaatttatttccctgtttcacgtctctcccttccattctgcaggagttttagctatttgagatcgtggaccatcagttttgcactttagagagtgtttctgactctaaacctgttttatcagaaaatttgttttttcttgatcttagctggaaaaatctgccaactttacacagtatttacttggttttgacccacagaatatagcacgttgtgcaaactgtcgattcagcgaaacttaaaaaagacaagaaactactgaggagcttagtaactgctgtttctgtacgtagtgtttaatcttccaagcacatctagtgtctgtcagtttctaattggcatgtgtaggctgctctgtgactgaagaattttcaaaccagctttacacccttcaggaaaaatcccttgtgattggatgtttactatctgccaggaaactggtactcaagatgttgaagctacagttattttatgatagcacacttcccttgatctgcttatttttattccatcaccatttacccttttttttttttaaattttgtagccattcttatgatgctcttgatttgttggttacacaaatcaattttattaaaaatccaaagataagtctttaggtatattttgtaccaaattaaattagaagacaaaaattgtgctttcatagttgctacaaaggtaaataatggagagatttggtacaaaacaacaaaatatatatatattctcatatatatatatatagctgataaaattacctgaggagtgtaatgcttatttttttgtgtatatctttgcaatctattttatatatattgacaaaagagactgtgaaatacttagccatgcagaatatgtgaccagaccagagcatgtgtaggaagactttacagtaatcattaactctaccccgaaatgatggactacaagttataatgtgtgttacctacacttcaatcagtaatattagcaaatctccaaatgttagtcacattggtttgtctcccttgtacattctttattcatgatattacagtgctgtaactgggtggtcctttttaaacaaaacattatttgcaaaacagagggtattatttgtttttaaagcttttgtaaataaaggcttcaaaatgttttcttataaaaaaaaaaaaaaaaaaaaaaaaaaaaaaaaaaaaaaaaaaaaaaaaaaa

SEQ ID NO: 181 - DNA, 2048 bp, Homo sapiens
gaaaggcgaggggcgccgggaactggcgtgtgggactccagacaggagaggctgcgccttccccgcaccgggaccttcgcgacacaccagatcctcgcccttggctcgcgcgaactcacaggatgaccaccaccctcgtgtctgccaccatcttcgacttgagcgaagttttatgcaagggtaacaagatgctcaactatagtgctcccagtgcagggggttgcctgctggacagaaaggcagtgggcacccctgctggtgggggcttccctcggaggcactcagtcaccctgcccagctccaagttccaccagaaccagctcctcagcagcctcaagggtgagccagcccccgctctgagctcgcgagacagccgcttccgagaccgctccttctcggaagggggcgagcggctgctgcccacccagaagcagcccgggggcggccaggtcaactccagccgctacaagacggagctgtgccgcccctttgaggaaaacggtgcctgtaagtacggggacaagtgccagttcgcacacggcatccacgagctccgcagcctgacccgccaccccaagtacaagacggagctgtgccgcaccttccacaccatcggcttttgcccctacgggccccgctgccacttcatccacaacgctgaagagcgccgtgccctggccggggcccgggacctctccgctgaccgtccccgcctccagcatagctttagctttgctgggtttcccagtgccgctgccaccgccgctgccaccgggctgctggacagccccacgtccatcaccccaccccctattctgagcgccgatgacctcctgggctcacctaccctgcccgatggcaccaataacccttttgccttctccagccaggagctggcaagcctctttgcccctagcatggggctgcccgggggtggctccccgaccaccttcctcttccggcccatgtccgagtcccctcacatgtttgactctccccccagccctcaggattctctctcggaccaggagggctacctgagcagctccagcagcagccacagtggctcagactccccgaccttggacaactcaagacgcctgcccatcttcagcagactttccatctcagatgactaagccagggtagggagggacctcctgcctactccagcccctaccctgcacccacatcccataccctcttctccctacccatcccattccccacaggccctacattaacaaggttaagctcaacccctttcccccagcacctcagaatgtgccctccctctccccctcataaccccacctaacataaggacaagtcaatttgtcagtagcttcttctggcttgaaaccccctccctggattttatagcccacttaccatgcataacagacaagtcccatattttgtcagtagatgccttttttttccggcttaagccttaagtgccaaatcacaagagaaaaagcagtaacagtttacagaagcaacttagtgccttgtaatctaactttgtcactgtgactacattacctcttcagcgccagagggcacccgtgggcctcccggagcctctgcccatggcggggtggagacccggaaccagcagccccctccactggcgacacaactgcaccttccctcatttcagtctcccgcacacttattcctcctcccctcttcccggtggcacctctccacctgtacccgcccccgcccccccaccccggccccttggaagagttgttgccagaccagggttttgggggaaacctgtcttgacattcaaaacctttttcttcccgatctgaacccctgttgactaatcttgcctgggtttgtgtaggtctgcaggaaggaaggctgaaaaagcggacgaagattttgacttaagtgggactttgtgatttaattttttcttttttttaagtggggaggaaggggaagctagatggactaggagagacttgattttggtgctaaagttccccagttcatatgtgacatctttttaaaaaaaaaaaaaaaaaaaaaaa

SEQ ID NO: 182 - DNA, 4656 bp, Homo sapiens
ccacgcgtccgggtggcccgtctggctgtggaacccaccgaaagctgagagtctctctctcagccgtaaaggtcggactcgctgaagcaatcaggcccggttctgaagagttttttccccgacgctcgttcggtggtttcttgtgaggacgcggcagcccgtggagtcggctgagggaaaagcgaggcaaggcaggcgggtcgtcaaagtcctacattttagctttcagtgctgaacttccttctcccttaaattattataaacttttgctgctgtttaataaacgtgaagatgtctcgcagtcctgatgcgaaggaagaccctgtggagtgccctctttgcatggagcccttggagatagatgatatcaactttttcccttgcacctgtggctaccagatttgccgattttgttggcatcgaattcgcactgatgaaaatgggctttgtcctgcatgtagaaagccatatccagaagacccagcagtttataaaccactctcccaggaagagctgcaaaggataaagaatgagaaaaaacagaaacaaaatgagagaaaacagaaaatatcagaaaatcgcaaacatttggctagtgtacgtgtcgtacaaaaaaacctcgtctttgttgtaggtttatctcagcgcctagcagacccagaggttttaaaacgaccagaatattttgggaagtttggtaaaatacataaagttgtcatcaataatagcacatcatatgcaggctcacagggtccaagtgccagtgcttatgtaacctatatccggtcagaagacgctctcagagccatacagtgtgtcaacaatgtggtagtagatggcagaacacttaaggcatctctaggtacaacaaaatactgcagttacttcttaaagaatatgcagtgtccaaaacctgactgcatgtatcttcatgaattgggggatgaggcggccagcttcacaaaagaggaaatgcaggcgggtaaacaccaagaatatgaacagaagctacttcaagaattatataaattaaatcccaattttcttcagctatctacgggttcagttgataaaaataagaacaaagtgacaccactgcagagccccattgacaaaccttcagattctctcagtatagggaacggtgataattcccagcagatatctaacagtgatacgccttcaccaccacctggtttgtcaaaatccaatccagtcatccccatcagttcatccaatcacagtgcacggtccccttttgaaggggcagtaacagagtcacagtcgttattctcagacatttttcgccatcccaaccctatcccaagtgggcttcctcctttccccagctccccacagacatccagtgactggcctacagcaccagaaccacagagcctcttcacatcagaaacaatcccagtatcatcctctacagactggcaagcagcttttggctttggttcttctaaacaaccagaggatgacttgggttttgatcccttcgatgtcactcgaaaagccttagcagacctgattgagaaggaactgtccgttcaagaccaaccttccctttcgcccacatctcttcagaactcctcttcacacactacaaccgccaaaggtccaggctctggattcctgcatcctgctgcagctacaaatgccaattctctcaatagtaccttttcagtcttgccccagaggttccctcaatttcagcagcaccgagcggtttataattcattcagttttccaggccaggcagcccgctatccttggatggcctttccacgcaatagcatcatgcacttgaaccacacagcaaaccccacctcaaatagtaatttcttggacttgaatctcccgccacagcacaacacaggtctgggagggatccctgtagcaggggaagaagaggtgaaggtttcgaccatgccactgtcaacctcttcccattcattacaacaaggacagcagcctacaagtctccacactactgtggcctgacaacagaactgagaggagaggattagactctggggtgcttgcatgggcaactggatttttgcatgattcctttatgattttgcttttaatgtatacacccagaagagccaatataaacgttcctcatgcctacagctagcgtgttacctcatagttgttgaagtatttcttcattaggcctttaacataatttattagtgtaataattttggcattgtttctcatgagtgatactatttctaactcataaaaataaacttgtagtactaagatcccaggtgagattagctagaattgttgttattttggctctattattgaaaaattatacaaaggtaatggtagtatcttgttttctggtttgtgaaaaaataatatcctaatctcctgaaaaatttgcaaattaacaagataatgtctattgcattctttgaatacttgagaagaaagaatacatataaaacaaaattggtggtgtcatttaatgctcagaaggatattgttggcgattgtttttagttgtctagatttatatcctataatatgcattacatgtgtagaaactgttttgttctctctcttttgcacttttgcactttctttttgaatggttgttaattatgcatagatggttaaaagataattattgtagcctaaatgcaatataatctcttttctaatgcactgcctagtataccaggaaatgcctcaaaaacagaacttcagtttatagttgacttatctgaaacttgaatacggagtaaacattgtatgtgaaaagcaaccatagtagtgtaacattgttactgaacaaacagtaattctgtgggatattgttttggaaatttcattgtttaataattaaaatgtgataataagataatattataagtacctgaccagaatgagactaaggcagaagagaagagattggatgtcctctaaaattaggccacctaaattgtaacagataattttaatcaagagaatagtggagtactttattaggacataatgtgaagtgatatttctgaaaacacatttcttgaaatagttttaaaactgataataaaggaaaagaaactgtacttagtttggagcagtggacaaaagctgattcagaaaacatgaccatattctgcctacatgaagcatctgggaagaaagggaaagtcacacctcctcttgagattttaaccattatgataaaaggtatgctttaatttgttaaaaaaaaaaagtatgaaaggggataatgtgaatacaaaaaagaagcctagagattgaaaataataataatagaacatgttattaggagatggtacttaatgtcatgttggagttggagttttcaaggttacctctatataaaattggattattttctgttagatataatgtgacaaattaaatgactttatcccaaggtacagtgaggtaaacaaaaatctattcttagatatccttagatttggttaactgaggctgtagaagcagcgaattgtctagccatttaagttatttttgtaaaattcagcataaacatcaatctctaatttctatctagaagtgactttaagacattacaagaacattgccaatttggaaaattccaataaaatactgtagacttattaatattgtagacttattatcagccttttactatagcttaatttaattatggttttcatttttactgtaagaggccaagacttcacttatgtctcctgtggagctgaggctcctgggccttgttattataacaaactctggctccttgtaatgatgcttactagctcaaagccttctccagcattcagtgttagcctttcattgcctggatcttcttacaaagccatagcaagtggttagtgccatttgctccttggtgttgagagatatacctgttaaatgaggcttctttcctttctcattcatagccagcgtggaaaaatcatcaggtagtttgcccagatttgccagagccctaaataaaatggcaaaacgatctccctgcctgcttctcctccccacccccacttacatgcacaccgtaaatcaagaaatgctttttgggcaattagactttatcttctaaatttttgcatagaatggctaaacatgatcttttgcctcactttgtaattcctacaccttccttgtaagcttcaccttttgcttacctaatattttatttaaacatggttttttaaaaaacctgaagctttaaaatcatagtcataattaattttacactaaaggacagaagaaattatacaacacataaaagaagccactacttcacatagcaagcaaattgaaatcaaaatgacagaagaatgagaaattctttaaaagcttcaggttttttttgttgttgttgttaaattcctgcatgatgcatcatgtgcaagggaaacttaatatacttttacacccttaacctttataaagtgactagcttttcccttaacataggaatttttaacctggagcccagatttttgagagtacacacaaaattgtgggtttgtgtgcatgtacatatgtccatttttttctagggagaagatccatagttattagatttgtgaaggatttggtgatccccttctcccatcaaaaaaaaaaaaaaaaaaaaaa

SEQ ID NO: 183 - DNA, 1742 bp, Homo sapiens
ccactctcggccgacacccctcatggccaaccgttacaccatggatctgactgccatctacgagagcctcctgtcgctgagccctgacgtgcccgtgccatccgaccatggagggactgagtccagcccaggctggggctcctcgggaccctggagcctgagcccctccgactccagcccgtctggggtcacctcccgcctgcctggccgctccaccagcctagtggagggccgcagctgtggctgggtgcccccaccccctggcttcgcaccgctggctccccgcctgggccctgagctgtcaccctcacccacttcgcccactgcaacctccaccaccccctcgcgctacaagactgagctatgtcggaccttctcagagagtgggcgctgccgctacggggccaagtgccagtttgcccatggcctgggcgagctgcgccaggccaatcgccaccccaaatacaagacggaactctgtcacaagttctacctccagggccgctgcccctacggctctcgctgccacttcatccacaaccctagcgaagacctggcggccccgggccaccctcctgtgcttcgccagagcatcagcttctccggcctgccctctggccgccggacctcaccaccaccaccaggcctggccggcccttccctgtcctccagctccttctcgccctccagctccccaccaccacctggggaccttccactgtcaccctctgccttctctgctgcccctggcacccccctggctcgaagagaccccaccccagtctgttgcccctcctgccgaagggccactcctatcagcgtctgggggcccttgggtggcctggttcggaccccctctgtacagtccctgggatccgaccctgatgaatatgccagcagcggcagcagcctggggggctctgactctcccgtcttcgaggcgggagtttttgcaccaccccagcccgtggcagccccccggcgactccccatcttcaatcgcatctctgtttctgagtgacaaagtgactgcccggtcagatcagctggatctcagcggggagccacgtctcttgcactgtggtctctgcatggaccccagggctgtggggacttgggggacagtaatcaagtaatccccttttccagaatgcattaacccactcccctgacctcacgctggggcaggtccccaagtgtgcaagctcagtattcatgatggtgggggatggagtgtcttccgaggttcttgggggaaaaaaaattgtagcatatttaagggaggcaatgaaccctctcccccacctcttccctgcccaaatctgtctcctagaatcttatgtgctgtgaataataggccttcactgcccctccagtttttatagacctgaggttccagtgtctcctggtaactggaacctctcctgagggggaatcctggtgctcaaattaccctccaaaagcaagtagccaaagccgttgccaaaccccacccataaatcaatgggccctttatttatgacgactttatttattctaatatgattttatagtatttatatatattgggtcgtctgcttcccttgtatttttcttcctttttttgtaatattgaaaacgacgatataattattataagtagactataatatatttagtaatatatattattaccttaaaagtctatttttgtgttttgggcatttttaaataaacaatctgagtgtaaaaaaaaaaaaaaa

SEQ ID NO: 184 - DNA, 3040 bp, Homo sapiens
cggggtcgccgcggaattcggcgagtagaaccgctgaggcgggcgcgggcccgggtggggccaaggttccggccactctgcagaatggagataatcaggagcaattttaagagtaatcttcacaaagtgtaccaggccatagaggaggccgacttcttcgccatcgatggggagttttcaggaatcagtgatggaccttcagtctctgcattaacaaatggttttgacactccagaagagaggtatcagaagcttaaaaagcattccatggactttttgctatttcagtttggcctttgcacttttaagtatgactacacagattcaaagtatataacgaagtcatttaacttctatgttttcccgaaacccttcaatagatcctcaccagatgtcaaatttgtttgtcagagctccagcattgactttctagcaagccagggatttgattttaataaagtttttcgaaatggaattccatatttaaatcaggaagaagaaagacagttaagagagcagtatgatgaaaaacgttcacaggcgaatggtgcaggagctctgtcctatgtatctcctaacacttcaaaatgtcctgtcacgattcctgaggatcaaaagaagtttattgaccaagtggtagagaaaatagaggatttattacaaagtgaagaaaacaagaacttggatttagagccatgtaccgggttccaaagaaaactaatttatcagactttgagctggaagtatccgaaaggcattcatgttgagactttagaaactgaaaagaaggagcgatatatagttatcagcaaagtagatgaagaagaacgcaaaagaagagagcagcagaaacatgccaaagaacaggaggagctgaatgatgctgtgggattttctagagtcattcacgccattgctaattcgggaaaacttgttattggacacaatatgctcttggacgtcatgcacacagttcatcagttctactgccctctgcctgcggacttaagtgagtttaaagagatgacaacatgtgttttccccagactcttggatactaaattgatggccagcacacaaccttttaaggatatcattaacaacacatcccttgcggaattggaaaagcggttaaaagagacacctttcaaccctcctaaagttgaaagtgccgaaggttttccaagttatgacacagcctctgaacaactccacgaggcaggctacgatgcctacatcacagggctgtgcttcatctccatggccaattacctaggttcttttctcagccctccaaaaattcatgtgtctgccagatcaaaactcattgaacctttttttaacaagttatttcttatgagggtcatggatatcccctatctaaacttggaaggaccagacttgcagcctaaacgtgatcatgttctccatgtgacattccccaaagaatggaaaaccagcgacctttaccagcttttcagtgcctttggtaacattcagatatcctggattgatgacacatcagcatttgtttcccttagccagcccgagcaagtaaagattgctgtcaataccagcaaatatgcagaaagctatcggatccaaacctatgctgaatatatggggagaaaacaggaagagaagcagatcaaaagaaagtggactgaagatagctggaaggaggctgacagcaaacggttaaacccccagtgcataccctacaccctgcagaatcactattaccgcaacaatagttttacagctcccagcacagtaggaaagagaaatttgagtcctagtcaagaggaagctggcctggaggacggagtgtcaggggagatttccgacactgagcttgagcagaccgattcctgtgcagagcccctctcagagggaaggaaaaaggccaagaaattaaaaagaatgaagaaggagctttctccagcaggaagcatctcgaagaacagccctgccacactctttgaagttcctgacacatggtaaccaagacctgagggcagcaaaccgctggtgctgtcgctgtgagcaagagccggctggcacatttggaagccgcactgtatttaacttaatcaaatgtggtatgggaggggttggaaaccaagttgtctcctgggggggagaaaacaggttttatttttgtggctgtggttttttccccttttttaatctaactgcctgttgacattgacactcatcacggttgtaggctgtcatgaatgtgtacgtgcttaaccagtgaattccgtgttgctcttgtgaggcctttcctgtcatgacccagtgtgcttaagaacctgcctgatggggagtgtcggctgtgaaatctgcaaaaagagctgacattccagctgctgtgatcatgaatttgggggtgtactgtcctgcctgtgcatcttctcgcactgagattttgaggcagttgcagccctcggttagtctcccagtggaaaaatcggttgtgcctccctgcttcccaccatagctgcctgaaaacatgacgctctcaagcttgtccttccttcaggaagatgtccactcatgcccacccatgagagggcttgccgtatgccctggcctttgggcatatttatgtagagttcctttctcctaagacgtgagtttctcatgggggatgtacgagtaaaaaggttaacttctgttcttatgcgtggcgctgtgttcactttccagagtctctgttcgtttgtttggatggcggtctcggggtacggcagcgtgtgtgcgtacgtgtctgtgtgtgtgtgtgtgtgtgtgtgtgtgtgtgtgtgtgtgtgtgtgtgtgtgaaatcgtgcaaatctacaacatgtcccagcccattctccgttgaaacagatcacagcaacgacaaacgctcatggcgctgctttgctccacccgcttcagatagatcattgttagatatttcacatttttgtatggtggaaataaaaatgaaaaatgtatttccaaaagatgaaaattaaaaacattttcataggaaaaaaaaaaaaaaaa

SEQ ID NO: 185 - DNA, 940 bp, Artificial Sequence
  Description of Artificial Sequence: Synthetic polynucleotide
gtacaaaaaagcagaagggccgtcaaggcccaccatggaggctttcccctgggcgccccgctcgccccgccgcggccgcgcccccccgcccatggcgctcgtgcccagcgcccgctacgtgagcgccccgggcccggcgcacccgcagcccttcagctcctggaacgactacctggggctcgccacgctcatcaccaaagcggtggacggcgagccgcgcttcggctgcgcccgcggtgggaacggcggcggcggctccccgccctcctcctcctcgtcgtcctgctgctccccccacacgggggccgggcctggggcgctggggccggcgctggggccgcccgactacgacgaggacgacgacgacgacagcgacgagccggggtcccggggccgctacctggggagcgcgctggaattgcgcgcgctggagctgtgcgcgggccccgccgaggccgggctgctggaggagcgcttcgccgagctgagcccgttcgcgggtcgtgccgccgccgtgctgctgggctgcgcgcccgccgccgccgccgccgccaccaccaccagcgaggcgacgccgcgcgaggagcgggccccggcgtgggcggccgagccccggctgcacgcggcctccggggcggcggccgcccggctgctgaagcccgagctgcaggtgtgcgtgttctgccggaacaacaaggaggcgatggcgctctacaccacccatatcctcaagggccccgacgggcgagtgctgtgtcccgtgctgcgccgctacacgtgtcccctgtgcggcgccagcggcgacaacgcgcacaccatcaagtactgcccgctctccaaagtgccgccgccgcccgcccgcccgccgccccgcagcgccagggacggcccgcctggcaagaagctgcgctcaggcctcatgggcccagctttcttgtac

SEQ ID NO: 186 - DNA, 1626 bp, Homo sapiens
ctttgtggtttggtctcagggaagtagcaggcgccggttgagagaactacggccctgtcggaaggtaacctccggtgcaaacgaccatcggcggcaggcgagcggtacgcttggcgtccgggccttcctgggcccgtctgaggaaacttgctgctcgaggccaggctgcctaggacctgtcccttttttctatactggctcccacatccgggttttttctccgggacggcccttcggatgcttgggccaatgggaatcgccatttagggtgctccgcccaccgggtcgcgtagagcatcctggaagtcgtagtaaatctctcgagagttctctccgcacgcgggctggagaagcgggtcctacgcacgctttgttgtcgcgctttgcctccgtccttccccctactcccgccttacctgacttccttttcggaggaagatccttgagcagccgacgttgggacaaaggatttggagaaacccagggctaaagtcacgtttttcctcctttaagacttacctcaacacttcactccatggcagttcccgagacccgccctaaccacactatttatatcaacaacctcaatgagaagatcaagaaggatgagctaaaaaagtccctgtacgccatcttctcccagtttggccagatcctggatatcctggtatcacggagcctgaagatgaggggccaggcctttgtcatcttcaaggaggtcagcagcgccaccaacgccctgcgctccatgcagggtttccctttctatgacaaacctatgcgtatccagtatgccaagaccgactcagatatcattgccaagatgaaaggcaccttcgtggagcgggaccgcaagcgggagaagaggaagcccaagagccaggagaccccggccaccaagaaggctgtgcaaggcgggggagccacccccgtggtgggggctgtccaggggcctgtcccgggcatgccgccgatgactcaggcgccccgcattatgcaccacatgccgggccagccgccctacatgccgccccctggtatgatccccccgccaggccttgcacctggccagatcccaccaggggccatgcccccgcagcagcttatgccaggacagatgccccctgcccagcctctttctgagaatccaccgaatcacatcttgttcctcaccaacctgccagaggagaccaacgagctcatgctgtccatgcttttcaatcagttccctggcttcaaggaggtccgtctggtacccgggcggcatgacatcgccttcgtggagtttgacaatgaggtacaggcaggggcagctcgcgatgccctgcagggctttaagatcacgcagaacaacgccatgaagatctcctttgccaagaagtagcaccttttccccccatgcctgccccttcccctgttctggggccacccctttcccccttggctcagccccctgaaggtaagtccccccttgggggccttcttggagccgtgtgtgagtgagtggtcgccacacagcattgtacccagagtctgtccccagacattgcacctggcgctgttaggccggaattaaagtggctttttgaggtttggtttttcacaaaaaaaaaaaaaaaaaaaaaa

SEQ ID NO: 187 - DNA, 1207 bp, Homo sapiens
ctgacttccttttcggaggaagatccttgagcagccgacgttgggacaaaggatttggagaaacccagggctaaagtcacgtttttcctcctttaagacttacctcaacacttcactccatggcagttcccgagacccgccctaaccacactatttatatcaacaacctcaatgagaagatcaagaaggatgagctaaaaaagtccctgtacgccatcttctcccagtttggccagatcctggatatcctggtatcacggagcctgaagatgaggggccaggcctttgtcatcttcaaggaggtcagcagcgccaccaacgccctgcgctccatgcagggtttccctttctatgacaaacctatgcgtatccagtatgccaagaccgactcagatatcattgccaagatgaaaggcaccttcgtggagcgggaccgcaagcgggagaagaggaagcccaagagccaggagaccccggccaccaagaaggctgtgcaaggcgggggagccacccccgtggtgggggctgtccaggggcctgtcccgggcatgccgccgatgactcaggcgccccgcattatgcaccacatgccgggccagccgccctacatgccgccccctggtatgatccccccgccaggccttgcacctggccagatcccaccaggggccatgcccccgcagcagcttatgccaggacagatgccccctgcccagcctctttctgagaatccaccgaatcacatcttgttcctcaccaacctgccagaggagaccaacgagctcatgctgtccatgcttttcaatcagttccctggcttcaaggaggtccgtctggtacccgggcggcatgacatcgccttcgtggagtttgacaatgaggtacaggcaggggcagctcgcgatgccctgcagggctttaagatcacgcagaacaacgccatgaagatctcctttgccaagaagtagcaccttttccccccatgcctgccccttcccctgttctggggccacccctttcccccttggctcagccccctgaaggtaagtccccccttgggggccttcttggagccgtgtgtgagtgagtggtcgccacacagcattgtacccagagtctgtccccagacattgcacctggcgctgttaggccggaattaaagtggctttttgaggtttggtttttcacaaaaaaaaaaaaaaaaaaa

SEQ ID NO: 188 - DNA, 1078 bp, Artificial Sequence
  Description of Artificial Sequence: Synthetic polynucleotide
gtacaaaaaagcaggctccaccatgcagcttgaaatccaagtagcactaaattttattatttcgtatttgtacaataagcttcccaggagacgtgtcaacatttttggtgaagaacttgaaagacttcttaagaagaaatatgaagggcactggtatcctgaaaagccatacaaaggatcggggtttagatgtatacacataggggagaaagtggacccagtgattgaacaagcatccaaagagagtggtttggacattgatgatgttcgtggcaatctgccacaggatcttagtgtttggatcgacccatttgaggtttcttaccaaattggtgaaaagggaccagtgaaggtgctttacgtggatgataataatgaaaatggatgtgagttggataaggagatcaaaaacagctttaacccagaggcccaggtttttatgcccataagtgacccagcctcatcagtgtccagctctccatcgcctccttttggtcactctgctgctgtaagccctaccttcatgccccggtccactcagcctttaacctttaccactgccacttttgctgccaccaagttcggctctaccaaaatgaagaatagtggccgtagcaacaaggttgcacgtacttctcccatcaacctcggcttgaatgtgaatgacctcttgaagcagaaagccatctcttcctcaatgcactctctgtatgggcttggcttgggtagccagcagcagccacagcaacagcagcagccagcccagccgccaccgccaccaccaccaccacagcagcaacaacagcagaaaacctctgctctttctcctaatgccaaggaatttatttttcctaatatgcagggtcaaggtagtagtaccaatggaatgttcccaggtgacagcccccttaacctcagtcctctccagtacagtaatgcctttgatgtgtttgcagcctatggaggcctcaatgagaagtcttttgtagatggcttgaattttagcttaaataacatgcagtattctaaccagcaattccagcctgttatggctaacttggacccagctttcttgtac

SEQ ID NO: 189 - DNA, 992 bp, Homo sapiens
ggcagggagtgagccctttaaatcctaagctccacctttgcttagaagagtctctgggcgttataaaaggggatgcagctcccttctgctctgggaaacgcctgctgctcttgcccttgcccacgggcccccagccccagcccctctcctgtggcccaccacccctgctttggtgccatgcagctgccacccttcgacatgtggaaggactacttcaacctgagccaggtggtgtgggcgctgatcgcaagtcggggtcaaaggctggagacccaagagattgaggagccaagtcccgggcctccgctggggcaggatcaggggctgggggcgccaggggccaacgggggcctggggaccctgtgcaacttctgcaagcacaacggggagtcccgccacgtctactcctcacaccagctgaagacaccggatggcgtggtggtgtgtcccatcctgaggcactacgtgtgtcccgtgtgcggggccaccggtgaccaggcccatacgctcaagtactgcccgcttaacggtggccagcagtccctctaccgccgcagcgggcgcaactcggccggacgcagggtcaagcgctgagcatcgtgagatgctcaccacccgcacccctgaccctcctggtccatcccacccaagtccctaaactctctcttccagtcacccagccctttggaatttctggcccccagaactccaccctggctggatcctgaaacagtggaggctgctgggagccaggccagccccgcccccttggacctgtcagccctcggagctctggcctgtgggcgttggcctgagggtccttggtgccgcgggaacccttcctgcacggccctgtagcgccctctgggccccggttcatggatcttttgtcctcgtggggcctgctggtgactggagccctgccccttcgacttctctgttccttgtggagttcttggatttttgaacctccaggattccacggtgctgtc

SEQ ID NO: 190 - DNA, 992 bp, Homo sapiens; identical to SEQ ID NO: 189

SEQ ID NO: 191 - DNA, 582 bp, Homo sapiens
accatggggacctttgacctgtggacagattacctgggtttggcacacctggttagggctctgagtgggaaagagggtcctgaaaccaggctgagcccccagccagagccagagccaatgctggagccggtgtcagccctggagccgatgccagcgccggagtcggtgccagtgccgggacccaaggatcagaagcgcagcctggagtcctcgccagctcccgaacgcctgtgctctttctgcaaacacaacggcgagtcccgggccatctaccagtcccacgtgctgaaggacgaggctggcagggtgctgtgtcccatcctgcgggactacgtgtgtccccagtgcggcgccacacgtgagcgcgcccacacccgacgcttctgcccacttactggccagggctacacctccgtctacagccacaccacccgaaactcggcaggcaagaagctggtccggcctgacaaggcgaagacacaggacacaggccaccgccgaggaggaggaggaggagcaggtttcagaggtgccgggaagtctgagccttcgccctcctgctctccctccatgtccacctag

SEQ ID NO: 192 - DNA, 973 bp, Homo sapiens
cggagctggaaatgcagctattgaggtcttcgaatgctgcggagctggaggcggaggcagctggggaggtccgagcgatgtgaccaggccgccatcgctcgtctcttcctctctcctgccgcctcctgtctcgaaaataacttttttagtctaaaaaaagaaagacaaaagtagtcgtccgcccctcacgccctctcttcctctcagccttccgcccggtgaggaagcccggggtggctgctccgccgtcggggccgcgccgccgagccccggccgccccgggccgcccccgcacgccgcccccatgcatcccttctacacccgggccgccaccatgataggcgagatcgccgccgccgtgtccttcatctccaagtttctccgcaccaaggggctcacgagcgagcgacagctgcagaccttcagccagagcctgcaggagctgctggcagaacattataaacatcactggttcccagaaaagccatgcaagggatcgggttaccgttgtattcgcatcaaccataaaatggatcctctgattggacaggcagcacagcggattggactgagcagtcaggagctgttcaggcttctcccaagtgaactcacactctgggttgacccctatgaagtgtcctacagaattggagaggatggctccatctgtgtgctgtatgaagcctcaccagcaggaggtagcactcaaaacagcaccaacgtgcaaatggtagacagccgaatcagctgtaaggaggaacttctcttgggcagaacgagcccttccaaaaactacaatatgatgactgtatcaggttaagatatagtctgtggatggatcatctgatgatgatggataaatttgatttttgctttgggtgggctcctcttggggatggattatggaatttaaaccatgtcacagctgtgaagatctggcacaagatagaatggtaaaaaaaaaaaaaaaaaa

SEQ ID NO: 193 - DNA, 4363 bp, Homo sapiens
ccacgcgtccgggcgcgggaaggtgcgggttgttggctgaggcaagccgtggctcgggcgacgcggggccaggagggcaggaccgtctgccggcgacagcccataccgtctgccgttgcgcgacacgaaccaccctccgatccgccatccccgcgtcgtcgccgctagtccgcccgcccgccctcgggccccccgctgccgagcccgacctcctaagagctgaaagaaattattgagagtcatagtccatagccccctgcttcgtcccccaaccctcaacgacgaaaaggacttcggtcccctggcccggcgacgcccgggaaggaaaggagagcgacctccgccccgcgctcaggccaccctggagggagaagccgccccgcggccggtagagcgccccgccgccgcggagacccgaagccgcctggagcccaaggctgtacacgtgccctgtgctgattctctgcctaggaaaggaccatgcagctagagatcaaagtggccctgaacttcatcatctcctacttgtacaacaagctgccccggcgccgggcagacctgtttggggaggagctagagcggcttttgaaaaagaaatatgaaggccactggtaccctgagaagccactgaaaggctctggcttccgctgtgttcacattggggagatggtggaccccgtggtggagctggccgccaagcggagtggcctggcagtggaagatgtgcgggccaatgtgcctgaggagctgagtgtctggattgatccctttgaggtgtcctaccagattggtgagaagggagctgtgaaagtgctgtacctggatgacagtgagggttgcggtgccccagagctggacaaggagatcaagagcagcttcaaccctgacgcccaggtgttcgtgcccattggcagccaggacagctccctgtccaactccccatcgccatcctttggccagtcacccagccctaccttcattccccgctccgctcagcccatcaccttcaccaccgcctccttcgctgccaccaaatttggctccactaagatgaagaaggggggcggggcagcaagtggtgggggtgtagccagcagtggggcgggtggccagcagccaccacagcagcctcgcatggcccgctcacccaccaacagcctgctgaagcacaagagcctctctctgtctatgcattcactgaacttcatcacggccaacccggcccctcagtcccagctctcacccaatgccaaggagttcgtgtacaacggtggtggctcacccagcctcttctttgatgcggccgatggccagggcagcggcaccccaggcccgtttggaggcagtggggctggcacctgcaacagcagcagctttgacatggcccaggtatttggaggtggtgccaacagcctcttcctggagaagacaccctttgtggaaggcctcagctacaacctgaacaccatgcagtatcccagccagcagttccagcccgtggtgctggccaactgaccatctacctgcccgtggggccaggagcacccaagaccacagaaaagagaaaggaaaggccaaaaaaaagaggaaaagaaaaatgtacaaaaagattttcgatcttctcactcttacttctagaaaaaagatccagcccaggcacggaatgggagggccctgcaaagcacccaagtgtgtttcactcaccccttaccgctcgcccaccggcctgtgatttatttggttggtttgggttttatatttctttttcttttttttttttcttacatgtagttttctatataacatctttaatgagtggcttcctgtgctaagaatggtccagatgtgaactgctgctccctgctcctcccttcctccttcacactcctagtttaggattgatgtgtccaagctcatagggaagaaagagctgcagctggagcctgaccctccctggaacagggagaggctggcccgtgtcactgcctctgtcacccagctatcctcgcactcaaagccatccaacctcagcaggccttctcgggccctgccacctgaataggtctgaccccagtccccactccctttcaggctgggccacagggagttgctggctggccacttgacaccctccccctggagctgatgtctgtgactacagggagattagcacttcgtctagtgaaactcctttcatctctgtcctatggccccaccccaccattccctctaggcccagaccatcatcatggccctggccattgatgtgtatgggctttctttccctcatgcagccccttcttccccaggctggatgttgtgggtagggaggggtgtgtgtgtgtgtatttggtttgctgtccttttttaaaggattccaagccatgtgaaacttcccttctggatgtgattctgggtcgcaagtccttatttatatgtgaggctggggaatgggctgggggtattggcagtccttttgcagggcagtgtgtgtggtggggtgacaccgctgtggcttagcccaagacactcccagaggaaaacactgcagaaggaactggtttgcagactgtggaaggatctgcagttttgtttttgaccaaaaaaataataataagttagctctgaagggcagagggaatacccaagcccctgatgcctatgagaagtccctggacttcaaccctcctgttgtttggccttagcccagagggagctgctcacctgagcacccttgggggtgggcagagaggcagggtgggattttagagttagtgtctgtgcgggggcagccctgagcctggagttgagactttggggtctcttagtttggaggtgttgagtgcatttgtgcccctgcctggttgagagcttcttggtacctcttgccaccccttctcactgccctgacccaaccccactggaccttgatgctgcgaggagtggtgtcctgacggactcagcactcccgcctgatgtattggatcataggagagcacttgctctcctgcctctgccaggagagggcttgttcctccaactctaggaggccaggcaagcatggacaggagccaagggagcagggtcattaactttttcttctttgcaaagtgggcacttgccatcagggtcccaatcaccagaaagcaccaaagcccctggcaccccacccactccatcctacccagggaccccaagtaggcaactgttatggcagtgggtccagcccaggccagcactgccagcctcctctccctgcagtaggcaccagctctacctcccccggcaggcaatgtcctggcttctcagcccagcaccatctgttcccctagacttctcaggggccagcccagtctgggccaccctttgtttccctcatcctcggctcccacacaggtgacagacccagcagatagcttctctctgggaaaggttggatgctgccttacatccccttctagccctcctcccatccacacacacaggcacccacccacaccaggtcggcttgtttctcacatgtagggagagaggggagaccaacccctttgtgtcttttgaaatacgaagaaaaatgtgtgttcaggagcatgactccagtgctgcgctcttgggcctagttcagtctgtcttgtctcaaatctaggcatttttgcttcaattttattttttttaagaatacaaaaacagaaatctgcactaatttacctggtttcgtaggaaaacttttttttattttttacattttttggtgtccgtttgtattgaataatttgctacatttgtaaaatgtaagaggtatataatatatgtatatttctaacgtaaaaaacataatttttttcttttcaagattttttcttaaaaagatgagagaaacatattttttcaggaaaaacaaactttaaaaaaaaaagaggagaaataaaaccttttctcccctttccccatcctctatctatccctctttcccaggaacaaatcaaaaggtggattatcttctgaagaatggaaactgttagtccagaatgatgtctttttctcaatgcagtgagttatagattctctagttttctccctagggatgggaagggggcattgaggcaagcctggagaggagcccggggagcagggtcatgaacttttttctttagtgaaggaggaatacaatcaagggttttgtattcagaatgttgtgcaatattttggaatgggacattggtgtgtttagagattttagtttaaaaacaaaacaaaaagattgatcaaatctgtacagtttctattgttccagatttttttaagtttgtattaaaagcatgatccataataaaaaaaaaaaaaaaaaaaaaaaaaaaaaaaa

SEQ ID NO: 194 - protein, 1389 aa, Leptotrichia shahii; identical to SEQ ID NO: 43

SEQ ID NO: 195 - protein, 1152 aa, Leptotrichia wadei
MKVTKVDGISHKKYIEEGKLVKSTSEENRTSERLSELLSIRLDIYIKNPDNASEEENRIRRENLKKFFSNKVLHLKDSVLYLKNRKEKNAVQDKNYSEEDISEYDLKNKNSFSVLKKILLNEDVNSEELEIFRKDVEAKLNKINSLKYSFEENKANYQKINENNVEKVGGKSKRNIIYDYYRESAKRNDYINNVQEAFDKLYKKEDIEKLFFLIENSKKHEKYKIREYYHKIIGRKNDKENFAKIIYEEIQNVNNIKELIEKIPDMSELKKSQVFYKYYLDKEELNDKNIKYAFCHFVEIEMSQLLKNYVYKRLSNISNDKIKRIFEYQNLKKLIENKLLNKLDTYVRNCGKYNYYLQVGEIATSDFIARNRQNEAFLRNIIGVSSVAYFSLRNILETENENDITGRMRGKTVKNNKGEEKYVSGEVDKIYNENKQNEVKENLKMFYSYDFNMDNKNEIEDFFANIDEAISSIRHGIVHFNLELEGKDIFAFKNIAPSEISKKMFQNEINEKKLKLKIFKQLNSANVFNYYEKDVIIKYLKNTKFNFVNKNIPFVPSFTKLYNKIEDLRNTLKFFWSVPKDKEEKDAQIYLLKNIYYGEFLNKFVKNSKVFFKITNEVIKINKQRNQKTGHYKYQKFENIEKTVPVEYLAIIQSREMINNQDKEEKNTYIDFIQQIFLKGFIDYLNKNNLKYIESNNNNDNNDIFSKIKIKKDNKEKYDKILKNYEKHNRNKEIPHEINEFVREIKLGKILKYTENLNMFYLILKLLNHKELTNLKGSLEKYQSANKEETFSDELELINLLNLDNNRVTEDFELEANEIGKFLDFNENKIKDRKELKKFDTNKIYFDGENIIKHRAFYNIKKYGMLNLLEKIADKAKYKISLKELKEYSNKKNEIEKNYTMQQNLHRKYARPKKDEKFNDEDYKEYEKAIGNIQKYTHLKNKVEFNELNLLQGLLLKILHRLVGYTSIWERDLRFRLKGEFPENHYIEEIFNFDNSKNVKYKSGQIVEKYINFYKELYKDNVEKRSIYSDKKVKKLKQEKKDLYIRNYIAHFNYIPHAEISLLEVLENLRKLLSYDRKLKNAIMKSIVDILKEYGFVATFKIGADKKIEIQTLESEKIVHLKNLKKKKLMTDRNSEELCELVKVMFEYKALE

SEQ ID NO: 196 - protein, 1120 aa, Listeria seeligeri
MWISIKTLIHHLGVLFFCDYMYNRREKKIIEVKTMRITKVEVDRKKVLISRDKNGGKLVYENEMQDNTEQIMHHKKSSFYKSVVNKTICRPEQKQMKKLVHGLLQENSQEKIKVSDVTKLNISNFLNHRFKKSLYYFPENSPDKSEEYRIEINLSQLLEDSLKKQQGTFICWESFSKDMELYINWAENYISSKTKLIKKSIRNNRIQSTESRSGQLMDRYMKDILNKNKPFDIQSVSEKYQLEKLTSALKATFKEAKKNDKEINYKLKSTLQNHERQIIEELKENSELNQFNIEIRKHLETYFPIKKTNRKVGDIRNLEIGEIQKIVNHRLKNKIVQRILQEGKLASYEIESTVNSNSLQKIKIEEAFALKFINACLFASNNLRNMVYPVCKKDILMIGEFKNSFKEIKHKKFIRQWSQFFSQEITVDDIELASWGLRGAIAPIRNEIIHLKKHSWKKFFNNPTFKVKKSKIINGKTKDVTSEFLYKETLFKDYFYSELDSVPELIINKMESSKILDYYSSDQLNQVFTIPNFELSLLTSAVPFAPSFKRVYLKGFDYQNQDEAQPDYNLKLNIYNEKAFNSEAFQAQYSLFKMVYYQVFLPQFTTNNDLFKSSVDFILTLNKERKGYAKAFQDIRKMNKDEKPSEYMSYIQSQLMLYQKKQEEKEKINHFEKFINQVFIKGFNSFIEKNRLTYICHPTKNTVPENDNIEIPFHTDMDDSNIAFWLMCKLLDAKQLSELRNEMIKFSCSLQSTEEISTFTKAREVIGLALLNGEKGCNDWKELFDDKEAWKKNMSLYVSEELLQSLPYTQEDGQTPVINRSIDLVKKYGTETILEKLFSSSDDYKVSAKDIAKLHEYDVTEKIAQQESLHKQWIEKPGLARDSAWTKKYQNVINDISNYQWAKTKVELTQVRHLHQLTIDLLSRLAGYMSIADRDFQFSSNYILERENSEYRVTSWILLSENKNKNKYNDYELYNLKNASIKVSSKNDPQLKVDLKQLRLTLEYLELFDNRLKEKRNNISHFNYLNGQLGNSILELFDDARDVLSYDRKLKNAVSKSLKEILSSHGMEVTFKPLYQTNHHLKIDKLQPKKIHHLGEKSTVSSNQVSNEYCQLVRTLLTMK

SEQ ID NO: 197 - protein, 1340 aa, Unknown
  Lachnospiraceae bacterium
MQISKVNHKHVAVGQKDRERITGFIYNDPVGDEKSLEDVVAKRANDTKVLFNVFNTKDLYDSQESDKSEKDKEIISKGAKFVAKSFNSAITILKKQNKIYSTLTSQQVIKELKDKFGGARIYDDDIEEALTETLKKSFRKENVRNSIKVLIENAAGIRSSLSKDEEELIQEYFVKQLVEEYTKTKLQKNVVKSIKNQNMVIQPDSDSQVLSLSESRREKQSSAVSSDTLVNCKEKDVLKAFLTDYAVLDEDERNSLLWKLRNLVNLYFYGSESIRDYSYTKEKSVWKEHDEQKANKTLFIDEICHITKIGKNGKEQKVLDYEENRSRCRKQNINYYRSALNYAKNNTSGIFENEDSNHFWIHLIENEVERLYNGIENGEEFKFETGYISEKVWKAVINHLSIKYIALGKAVYNYAMKELSSPGDIEPGKIDDSYINGITSFDYEIIKAEESLQRDISMNVVFATNYLACATVDTDKDFLLFSKEDIRSCTKKDGNLCKNIMQFWGGYSTWKNFCEEYLKDDKDALELLYSLKSMLYSMRNSSFHFSTENVDNGSWDTELIGKLFEEDCNRAARIEKEKFYNNNLHMFYSSSLLEKVLERLYSSHHERASQVPSFNRVFVRKNFPSSLSEQRITPKFTDSKDEQIWQSAVYYLCKEIYYNDFLQSKEAYKLFREGVKNLDKNDINNQKAADSFKQAVVYYGKAIGNATLSQVCQAIMTEYNRQNNDGLKKKSAYAEKQNSNKYKHYPLFLKQVLQSAFWEYLDENKEIYGFISAQIHKSNVEIKAEDFIANYSSQQYKKLVDKVKKTPELQKWYTLGRLINPRQANQFLGSIRNYVQFVKDIQRRAKENGNPIRNYYEVLESDSIIKILEMCTKLNGTTSNDIHDYFRDEDEYAEYISQFVNFGDVHSGAALNAFCNSESEGKKNGIYYDGINPIVNRNWVLCKLYGSPDLISKIISRVNENMIHDFHKQEDLIREYQIKGICSNKKEQQDLRTFQVLKNRVELRDIVEYSEIINELYGQLIKWCYLRERDLMYFQLGFHYLCLNNASSKEADYIKINVDDRNISGAILYQIAAMYINGLPVYYKKDDMYVALKSGKKASDELNSNEQTSKKINYFLKYGNNILGDKKDQLYLAGLELFENVAEHENIIIFRNEIDHFHYFYDRDRSMLDLYSEVFDRFFTYDMKLRKNVVNMLYNILLDHNIVSSFVFETGEKKVGRGDSEVIKPSAKIRLRANNGVSSDVFTYKVGSKDELKIATLPAKNEEFLLNVARLIYYPDMEAVSENMVREGVVKVEKSNDKKGKISRGSNTRSSNQSKYNNKSKNRMNYSMGSIFEKMDLKFD

SEQ ID NO: 198 - protein, 1437 aa, Unknown
  Lachnospiraceae bacterium
MKISKVREENRGAKLTVNAKTAVVSENRSQEGILYNDPSRYGKSRKNDEDRDRYIESRLKSSGKLYRIFNEDKNKRETDELQWFLSEIVKKINRRNGLVLSDMLSVDDRAFEKAFEKYAELSYTNRRNKVSGSPAFETCGVDAATAERLKGIISETNFINRIKNNIDNKVSEDIIDRIIAKYLKKSLCRERVKRGLKKLLMNAFDLPYSDPDIDVQRDFIDYVLEDFYHVRAKSQVSRSIKNMNMPVQPEGDGKFAITVSKGGTESGNKRSAEKEAFKKFLSDYASLDERVRDDMLRRMRRLVVLYFYGSDDSKLSDVNEKFDVWEDHAARRVDNREFIKLPLENKLANGKTDKDAERIRKNTVKELYRNQNIGCYRQAVKAVEEDNNGRYFDDKMLNMFFIHRIEYGVEKIYANLKQVTEFKARTGYLSEKIWKDLINYISIKYIAMGKAVYNYAMDELNASDKKEIELGKISEEYLSGISSFDYELIKAEEMLQRETAVYVAFAARHLSSQTVELDSENSDFLLLKPKGTMDKNDKNKLASNNILNFLKDKETLRDTILQYFGGHSLWTDFPFDKYLAGGKDDVDFLTDLKDVIYSMRNDSFHYATENHNNGKWNKELISAMFEHETERMTVVMKDKFYSNNLPMFYKNDDLKKLLIDLYKDNVERASQVPSFNKVFVRKNFPALVRDKDNLGIELDLKADADKGENELKFYNALYYMFKEIYYNAFLNDKNVRERFITKATKVADNYDRNKERNLKDRIKSAGSDEKKKLREQLQNYIAENDFGQRIKNIVQVNPDYTLAQICQLIMTEYNQQNNGCMQKKSAARKDINKDSYQHYKMLLLVNLRKAFLEFIKENYAFVLKPYKHDLCDKADFVPDFAKYVKPYAGLISRVAGSSELQKWYIVSRFLSPAQANHMLGFLHSYKQYVWDIYRRASETGTEINHSIAEDKIAGVDITDVDAVIDLSVKLCGTISSEISDYFKDDEVYAEYISSYLDFEYDGGNYKDSLNRFCNSDAVNDQKVALYYDGEHPKLNRNIILSKLYGERRFLEKITDRVSRSDIVEYYKLKKETSQYQTKGIFDSEDEQKNIKKFQEMKNIVEFRDLMDYSEIADELQGQLINWIYLRERDLMNFQLGYHYACLNNDSNKQATYVTLDYQGKKNRKINGAILYQICAMYINGLPLYYVDKDSSEWTVSDGKESTGAKIGEFYRYAKSFENTSDCYASGLEIFENISEHDNITELRNYIEHFRYYSSFDRSFLGIYSEVFDRFFTYDLKYRKNVPTILYNILLQHFVNVRFEFVSGKKMIGIDKKDRKIAKEKECARITIREKNGVYSEQFTYKLKNGTVYVDARDKRYLQSIIRLLFYPEKVNMDEMIEVKEKKKPSDNNTGKGYSKRDRQQDRKEYDKYKEKKKKEGNFLSGMGGNINWDEINAQLKN

SEQ ID NO: 199 - protein, 1385 aa, Clostridium aminophilum
MKFSKVDHTRSAVGIQKATDSVHGMLYTDPKKQEVNDLDKRFDQLNVKAKRLYNVFNQSKAEEDDDEKRFGKVVKKLNRELKDLLFHREVSRYNSIGNAKYNYYGIKSNPEEIVSNLGMVESLKGERDPQKVISKLLLYYLRKGLKPGTDGLRMILEASCGLRKLSGDEKELKVFLQTLDEDFEKKTFKKNLIRSIENQNMAVQPSNEGDPIIGITQGRFNSQKNEEKSAIERMMSMYADLNEDHREDVLRKLRRLNVLYFNVDTEKTEEPTLPGEVDTNPVFEVWHDHEKGKENDRQFATFAKILTEDRETRKKEKLAVKEALNDLKSAIRDHNIMAYRCSIKVTEQDKDGLFFEDQRINRFWIHHIESAVERILASINPEKLYKLRIGYLGEKVWKDLLNYLSIKYIAVGKAVFHFAMEDLGKTGQDIELGKLSNSVSGGLTSFDYEQIRADETLQRQLSVEVAFAANNLFRAVVGQTGKKIEQSKSEENEEDFLLWKAEKIAESIKKEGEGNTLKSILQFFGGASSWDLNHFCAAYGNESSALGYETKFADDLRKAIYSLRNETFHFTTLNKGSFDWNAKLIGDMFSHEAATGIAVERTRFYSNNLPMFYRESDLKRIMDHLYNTYHPRASQVPSFNSVFVRKNFRLFLSNTLNTNTSFDTEVYQKWESGVYYLFKEIYYNSFLPSGDAHHLFFEGLRRIRKEADNLPIVGKEAKKRNAVQDFGRRCDELKNLSLSAICQMIMTEYNEQNNGNRKVKSTREDKRKPDIFQHYKMLLLRTLQEAFAIYIRREEFKFIFDLPKTLYVMKPVEEFLPNWKSGMFDSLVERVKQSPDLQRWYVLCKFLNGRLLNQLSGVIRSYIQFAGDIQRRAKANHNRLYMDNTQRVEYYSNVLEVVDFCIKGTSRFSNVFSDYFRDEDAYADYLDNYLQFKDEKIAEVSSFAALKTFCNEEEVKAGIYMDGENPVMQRNIVMAKLFGPDEVLKNVVPKVTREEIEEYYQLEKQIAPYRQNGYCKSEEDQKKLLRFQRIKNRVEFQTITEFSEIINELLGQLISWSFLRERDLLYFQLGFHYLCLHNDTEKPAEYKEISREDGTVIRNAILHQVAAMYVGGLPVYTLADKKLAAFEKGEADCKLSISKDTAGAGKKIKDFFRYSKYVLIKDRMLTDQNQKYTIYLAGLELFENTDEHDNITDVRKYVDHFKYYATSDENAMSILDLYSEIHDRFFTYDMKYQKNVANMLENILLRHFVLIRPEFFTGSKKVGEGKKITCKARAQIEIAENGMRSEDFTYKLSDGKKNISTCMIAARDQKYLNTVARLLYYPHEAKKSIVDTREKKNNKKTNRGDGTFNKQKGTARKEKDNGPREFNDTGFSNTPFAGFDPFRNS

SEQ ID NO: 200 - protein, 1175 aa, Carnobacterium gallinarum
MRITKVKIKLDNKLYQVTMQKEEKYGTLKLNEESRKSTAEILRLKKASFNKSFHSKTINSQKENKNATIKKNGDYISQIFEKLVGVDTNKNIRKPKMSLTDLKDLPKKDLALFIKRKFKNDDIVEIKNLDLISLFYNALQKVPGEHFTDESWADFCQEMMPYREYKNKFIERKIILLANSIEQNKGFSINPETFSKRKRVLHQWAIEVQERGDFSILDEKLSKLAEIYNFKKMCKRVQDELNDLEKSMKKGKNPEKEKEAYKKQKNFKIKTIWKDYPYKTHIGLIEKIKENEELNQFNIEIGKYFEHYFPIKKERCTEDEPYYLNSETIATTVNYQLKNALISYLMQIGKYKQFGLENQVLDSKKLQEIGIYEGFQTKFMDACVFATSSLKNIIEPMRSGDILGKREFKEAIATSSFVNYHHFFPYFPFELKGMKDRESELIPFGEQTEAKQMQNIWALRGSVQQIRNEIFHSFDKNQKFNLPQLDKSNFEFDASENSTGKSQSYIETDYKFLFEAEKNQLEQFFIERIKSSGALEYYPLKSLEKLFAKKEMKFSLGSQVVAFAPSYKKLVKKGHSYQTATEGTANYLGLSYYNRYELKEESFQAQYYLLKLIYQYVFLPNFSQGNSPAFRETVKAILRINKDEARKKMKKNKKFLRKYAFEQVREMEFKETPDQYMSYLQSEMREEKVRKAEKNDKGFEKNITMNFEKLLMQIFVKGFDVFLTTFAGKELLLSSEEKVIKETEISLSKKINEREKTLKASIQVEHQLVATNSAISYWLFCKLLDSRHLNELRNEMIKFKQSRIKFNHTQHAELIQNLLPIVELTILSNDYDEKNDSQNVDVSAYFEDKSLYETAPYVQTDDRTRVSFRPILKLEKYHTKSLIEALLKDNPQFRVAATDIQEWMHKREEIGELVEKRKNLHTEWAEGQQTLGAEKREEYRDYCKKIDRFNWKANKVTLTYLSQLHYLITDLLGRMVGFSALFERDLVYFSRSFSELGGETYHISDYKNLSGVLRLNAEVKPIKIKNIKVIDNEENPYKGNEPEVKPFLDRLHAYLENVIGIKAVHGKIRNQTAHLSVLQLELSMIESMNNLRDLMAYDRKLKNAVTKSMIKILDKHGMILKLKIDENHKNFEIESLIPKEIIHLKDKAIKTNQVSEEYCQLVLALLTTNPGNQLN

SEQ ID NO: 201 - protein, 1164 aa, Carnobacterium gallinarum
MRMTKVKINGSPVSMNRSKLNGHLVWNGTTNTVNILTKKEQSFAASFLNKTLVKADQVKGYKVLAENIFIIFEQLEKSNSEKPSVYLNNIRRLKEAGLKRFFKSKYHEEIKYTSEKNQSVPTKLNLIPLFFNAVDRIQEDKFDEKNWSYFCKEMSPYLDYKKSYLNRKKEILANSIQQNRGFSMPTAEEPNLLSKRKQLFQQWAMKFQESPLIQQNNFAVEQFNKEFANKINELAAVYNVDELCTAITEKLMNFDKDKSNKTRNFEIKKLWKQHPHNKDKALIKLFNQEGNEALNQFNIELGKYFEHYFPKTGKKESAESYYLNPQTIIKTVGYQLRNAFVQYLLQVGKLHQYNKGVLDSQTLQEIGMYEGFQTKFMDACVFASSSLRNIIQATTNEDILTREKFKKELEKNVELKHDLFFKTEIVEERDENPAKKIAMTPNELDLWAIRGAVQRVRNQIFHQQINKRHEPNQLKVGSFENGDLGNVSYQKTIYQKLFDAEIKDIEIYFAEKIKSSGALEQYSMKDLEKLFSNKELTLSLGGQVVAFAPSYKKLYKQGYFYQNEKTIELEQFTDYDFSNDVFKANYYLIKLIYHYVFLPQFSQANNKLFKDTVHYVIQQNKELNTTEKDKKNNKKIRKYAFEQVKLMKNESPEKYMQYLQREMQEERTIKEAKKTNEEKPNYNFEKLLIQIFIKGFDTFLRNFDLNLNPAEELVGTVKEKAEGLRKRKERIAKILNVDEQIKTGDEEIAFWIFAKLLDARHLSELRNEMIKFKQSSVKKGLIKNGDLIEQMQPILELCILSNDSESMEKESFDKIEVFLEKVELAKNEPYMQEDKLTPVKFRFMKQLEKYQTRNFIENLVIENPEFKVSEKIVLNWHEEKEKIADLVDKRTKLHEEWASKAREIEEYNEKIKKNKSKKLDKPAEFAKFAEYKIICEAIENFNRLDHKVRLTYLKNLHYLMIDLMGRMVGFSVLFERDFVYMGRSYSALKKQSIYLNDYDTFANIRDWEVNENKHLFGTSSSDLTFQETAEFKNLKKPMENQLKALLGVTNHSFEIRNNIAHLHVLRNDGKGEGVSLLSCMNDLRKLMSYDRKLKNAVTKAIIKILDKHGMILKLTNNDHTKPFEIESLKPKKIIHLEKSNHSFPMDQVSQEYCDLVKKMLVFTN

SEQ ID NO: 202 - protein, 1154 aa, Paludibacter propionicigenes
MRVSKVKVKDGGKDKMVLVHRKTTGAQLVYSGQPVSNETSNILPEKKRQSFDLSTLNKTIIKFDTAKKQKLNVDQYKIVEKIFKYPKQELPKQIKAEEILPFLNHKFQEPVKYWKNGKEESFNLTLLIVEAVQAQDKRKLQPYYDWKTWYIQTKSDLLKKSIENNRIDLTENLSKRKKALLAWETEFTASGSIDLTHYHKVYMTDVLCKMLQDVKPLTDDKGKINTNAYHRGLKKALQNHQPAIFGTREVPNEANRADNQLSIYHLEVVKYLEHYFPIKTSKRRNTADDIAHYLKAQTLKTTIEKQLVNAIRANIIQQGKTNHHELKADTTSNDLIRIKTNEAFVLNLTGTCAFAANNIRNMVDNEQTNDILGKGDFIKSLLKDNTNSQLYSFFFGEGLSTNKAEKETQLWGIRGAVQQIRNNVNHYKKDALKTVFNISNFENPTITDPKQQTNYADTIYKARFINELEKIPEAFAQQLKTGGAVSYYTIENLKSLLTTFQFSLCRSTIPFAPGFKKVFNGGINYQNAKQDESFYELMLEQYLRKENFAEESYNARYFMLKLIYNNLFLPGFTTDRKAFADSVGFVQMQNKKQAEKVNPRKKEAYAFEAVRPMTAADSIADYMAYVQSELMQEQNKKEEKVAEETRINFEKFVLQVFIKGFDSFLRAKEFDFVQMPQPQLTATASNQQKADKLNQLEASITADCKLTPQYAKADDATHIAFYVFCKLLDAAHLSNLRNELIKFRESVNEFKFHHLLEIIEICLLSADVVPTDYRDLYSSEADCLARLRPFIEQGADITNWSDLFVQSDKHSPVIHANIELSVKYGTTKLLEQIINKDTQFKTTEANFTAWNTAQKSIEQLIKQREDHHEQWVKAKNADDKEKQERKREKSNFAQKFIEKHGDDYLDICDYINTYNWLDNKMHFVHLNRLHGLTIELLGRMAGFVALFDRDFQFFDEQQIADEFKLHGFVNLHSIDKKLNEVPTKKIKEIYDIRNKIIQINGNKINESVRANLIQFISSKRNYYNNAFLHVSNDEIKEKQMYDIRNHIAHFNYLTKDAADFSLIDLINELRELLHYDRKLKNAVSKAFIDLFDKHGMILKLKLNADHKLKVESLEPKKIYHLGSSAKDKPEYQYCTNQVMMAYCNMCRSLLEMKK

SEQ ID NO: 203 - protein, 970 aa, Listeria weihenstephanensis
MLALLHQEVPSQKLHNLKSLNTESLTKLFKPKFQNMISYPPSKGAEHVQFCLTDIAVPAIRDLDEIKPDWGIFFEKLKPYTDWAESYIHYKQTTIQKSIEQNKIQSPDSPRKLVLQKYVTAFLNGEPLGLDLVAKKYKLADLAESFKVVDLNEDKSANYKIKACLQQHQRNILDELKEDPELNQYGIEVKKYIQRYFPIKRAPNRSKHARADFLKKELIESTVEQQFKNAVYHYVLEQGKMEAYELTDPKTKDLQDIRSGEAFSFKFINACAFASNNLKMILNPECEKDILGKGDFKKNLPNSTTQSDVVKKMIPFFSDEIQNVNFDEAIWAIRGSIQQIRNEVYHCKKHSWKSILKIKGFEFEPNNMKYTDSDMQKLMDKDIAKIPDFIEEKLKSSGIIRFYSHDKLQSIWEMKQGFSLLTTNAPFVPSFKRVYAKGHDYQTSKNRYYDLGLTTFDILEYGEEDFRARYFLTKLVYYQQFMPWFTADNNAFRDAANFVLRLNKNRQQDAKAFINIREVEEGEMPRDYMGYVQGQIAIHEDSTEDTPNHFEKFISQVFIKGFDSHMRSADLKFIKNPRNQGLEQSEIEEMSFDIKVEPSFLKNKDDYIAFWTFCKMLDARHLSELRNEMIKYDGHLTGEQEIIGLALLGVDSRENDWKQFFSSEREYEKIMKGYVGEELYQREPYRQSDGKTPILFRGVEQARKYGTETVIQRLFDASPEFKVSKCNITEWERQKETIEETIERRKELHNEWEKNPKKPQNNAFFKEYKECCDAIDAYNWHKNKTTLVYVNELHHLLIEILGRYVGYVAIADRDFQCMANQYFKHSGITERVEYWGDNRLKSIKKLDTFLKKEGLFVSEKNARNHIAHLNYLSLKSECTLLYLSERLREIFKYDRKLKNAVSKSLIDILDRHGMSVVFANLKENKHRLVIKSLEPKKLRHLGEKKIDNGYIETNQVSEEYCGIVKRLLEI

SEQ ID NO: 204 - protein, 1051 aa, Listeria newyorkensis
MKITKMRVDGRTIVMERTSKEGQLGYEGIDGNKTTEIIFDKKKESFYKSILNKTVRKPDEKEKNRRKQAINKAINKEITELMLAVLHQEVPSQKLHNLKSLNTESLTKLFKPKFQNMISYPPSKGAEHVQFCLTDIAVPAIRDLDEIKPDWGIFFEKLKPYTDWAESYIHYKQTTIQKSIEQNKIQSPDSPRKLVLQKYVTAFLNGEPLGLDLVAKKYKLADLAESFKLVDLNEDKSANYKIKACLQQHQRNILDELKEDPELNQYGIEVKKYIQRYFPIKRAPNRSKHARADFLKKELIESTVEQQFKNAVYHYVLEQGKMEAYELTDPKTKDLQDIRSGEAFSFKFINACAFASNNLKMILNPECEKDILGKGNFKKNLPNSTTRSDVVKKMIPFFSDELQNVNFDEAIWAIRGSIQQIRNEVYHCKKHSWKSILKIKGFEFEPNNMKYADSDMQKLMDKDIAKIPEFIEEKLKSSGVVRFYRHDELQSIWEMKQGFSLLTTNAPFVPSFKRVYAKGHDYQTSKNRYYNLDLTTFDILEYGEEDFRARYFLTKLVYYQQFMPWFTADNNAFRDAANFVLRLNKNRQQDAKAFINIREVEEGEMPRDYMGYVQGQIAIHEDSIEDTPNHFEKFISQVFIKGFDRHMRSANLKFIKNPRNQGLEQSEIEEMSFDIKVEPSFLKNKDDYIAFWIFCKMLDARHLSELRNEMIKYDGHLTGEQEIIGLALLGVDSRENDWKQFFSSEREYEKIMKGYVVEELYQREPYRQSDGKTPILFRGVEQARKYGTETVIQRLFDANPEFKVSKCNLAEWERQKETIEETIKRRKELHNEWAKNPKKPQNNAFFKEYKECCDAIDAYNWHKNKTTLAYVNELHHLLIEILGRYVGYVAIADRDFQCMANQYFKHSGITERVEYWGDNRLKSIKKLDTFLKKEGLFVSEKNARNHIAHLNYLSLKSECTLLYLSERLREIFKYDRKLKNAVSKSLIDILDRHGMSVVFANLKENKHRLVIKSLEPKKLRHLGGKKIDGGYIETNQVSEEYCGIVKRLLEM

SEQ ID NO: 205 - protein, 1152 aa, Leptotrichia wadei; identical to SEQ ID NO: 195

SEQ ID NO: 206 - protein, 1285 aa, Rhodobacter capsulatus
MQIGKVQGRTISEFGDPAGGLKRKISTDGKNRKELPAHLSSDPKALIGQWISGIDKIYRKPDSRKSDGKAIHSPTPSKMQFDARDDLGEAFWKLVSEAGLAQDSDYDQFKRRLHPYGDKFQPADSGAKLKFEADPPEPQAFHGRWYGAMSKRGNDAKELAAALYEHLHVDEKRIDGQPKRNPKTDKFAPGLVVARALGIESSVLPRGMARLARNWGEEEIQTYFVVDVAASVKEVAKAAVSAAQAFDPPRQVSGRSLSPKVGFALAEHLERVTGSKRCSFDPAAGPSVLALHDEVKKTYKRLCARGKNAARAFPADKTELLALMRHTHENRVRNQMVRMGRVSEYRGQQAGDLAQSHYWTSAGQTEIKESEIFVRLWVGAFALAGRSMKAWIDPMGKIVNTEKNDRDLTAAVNIRQVISNKEMVAEAMARRGIYFGETPELDRLGAEGNEGFVFALLRYLRGCRNQTFHLGARAGFLKEIRKELEKTRWGKAKEAEHVVLTDKTVAAIRAIIDNDAKALGARLLADLSGAFVAHYASKEHFSTLYSEIVKAVKDAPEVSSGLPRLKLLLKRADGVRGYVHGLRDTRKHAFATKLPPPPAPRELDDPATKARYIALLRLYDGPFRAYASGITGTALAGPAARAKEAATALAQSVNVTKAYSDVMEGRTSRLRPPNDGETLREYLSALTGETATEFRVQIGYESDSENARKQAEFIENYRRDMLAFMFEDYIRAKGFDWILKIEPGATAMTRAPVLPEPIDTRGQYEHWQAALYLVMHFVPASDVSNLLHQLRKWEALQGKYELVQDGDATDQADARREALDLVKRFRDVLVLFLKTGEARFEGRAAPFDLKPFRALFANPATFDRLFMATPTTARPAEDDPEGDGASEPELRVARTLRGLRQIARYNHMAVLSDLFAKHKVRDEEVARLAEIEDETQEKSQIVAAQELRTDLHDKVMKCHPKTISPEERQSYAAAIKTIEEHRFLVGRVYLGDHLRLHRLMMDVIGRLIDYAGAYERDTGTFLINASKQLGAGADWAVTIAGAANTDARTQTRKDLAHFNVLDRADGTPDLTALVNRAREMMAYDRKRKNAVPRSILDMLARLGLTLKWQMKDHLLQDATITQAAIKHLDKVRLTVGGPAAVTEARFSQDYLQMVAAVFNGSVQNPKPRRRDDGDAWHKPPKPATAQSQPDQKPPNKAPSAGSRLPPPQVGEVYEGVVVKVIDTGSLGFLAVEGVAGNIGLHISRLRRIREDAIIVGRRYRFRVEIYVPPKSNTSKLNAADLVRID

SEQ ID NO: 207 - protein, 1285 aa, Rhodobacter capsulatus
MQIGKVQGRTISEFGDPAGGLKRKISTDGKNRKELPAHLSSDPKALIGQWISGIDKIYRKPDSRKSDGKAIHSPTPSKMQFDARDDLGEAFWKLVSEAGLAQDSDYDQFKRRLHPYGDKFQPADSGAKLKFEADPPEPQAFHGRWYGAMSKRGNDAKELAAALYEHLHVDEKRIDGQPKRNPKTDKFAPGLVVARALGIESSVLPRGMARLARNWGEEEIQTYFVVDVAASVKEVAKAAVSAAQAFDPPRQVSGRSLSPKVGFALAEHLERVTGSKRCSFDPAAGPSVLALHDEVKKTYKRLCARGKNAARAFPADKTELLALMRHTHENRVRNQMVRMGRVSEYRGQQAGDLAQSHYWTSAGQTEIKESEIFVRLWVGAFALAGRSMKAWIDPMGKIVNTEKNDRDLTAAVNIRQVISNKEMVAEAMARRGIYFGETPELDRLGAEGNEGFVFALLRYLRGCRNQTFHLGARAGFLKEIRKELEKTRWGKAKEAEHVVLTDKTVAAIRAIIDNDAKALGARLLADLSGAFVAHYASKEHFSTLYSEIVKAVKDAPEVSSGLPRLKLLLKRADGVRGYVHGLRDTRKHAFATKLPPPPAPRELDDPATKARYIALLRLYDGPFRAYASGITGTALAGPAARAKEAATALAQSVNVTKAYSDVMEGRSSRLRPPNDGETLREYLSALTGETATEFRVQIGYESDSENARKQAEFIENYRRDMLAFMFEDYIRAKGFDWILKIEPGATAMTRAPVLPEPIDTRGQYEHWQAALYLVMHFVPASDVSNLLHQLRKWEALQGKYELVQDGDATDQADARREALDLVKRFRDVLVLFLKTGEARFEGRAAPFDLKPFRALFANPATFDRLFMATPTTARPAEDDPEGDGASEPELRVARTLRGLRQIARYNHMAVLSDLFAKHKVRDEEVARLAEIEDETQEKSQIVAAQELRTDLHDKVMKCHPKTISPEERQSYAAAIKTIEEHRFLVGRVYLGDHLRLHRLMMDVIGRLIDYAGAYERDTGTFLINASKQLGAGADWAVTIAGAANTDARTQTRKDLAHFNVLDRADGTPDLTALVNRAREMMAYDRKRKNAVPRSILDMLARLGLTLKWQMKDHLLQDATITQAAIKHLDKVRLTVGGPAAVTEARFSQDYLQMVAAVFNGSVQNPKPRRRDDGDAWHKPPKPATAQSQPDQKPPNKAPSAGSRLPPPQVGEVYEGVVVKVIDTGSLGFLAVEGVAGNIGLHISRLRRIREDAIIVGRRYRFRVEIYVPPKSNTSKLNAADLVRID

SEQ ID NO: 208 - protein, 1285 aa, Rhodobacter capsulatus; identical to SEQ ID NO: 207

SEQ ID NO: 209 - protein, 1154 aa, Paludibacter propionicigenes
MKTSANNIYFNGINSFKKIFDSKGAIAPIAEKSCRNFDIKAQNDVNKEQRIHYFAVGHTFKQLDTENLFEYVLDENLRAKRPTRFISLQQFDKEFIENIKRLISDIRNINSHYIHRFDPLKIDAVPTNIIDFLKESFELAVIQIYLKEKGINYLQFSENPHADQKLVAFLHDKFLPLDEKKTSMLQNETPQLKEYKEYRKYFKTLSKQAAIDQLLFAEKETDYIWNLFDSHPVLTISAGKYLSFYSCLFLLSMFLYKSEANQLISKIKGFKKNTTEEEKSKREIFTFFSKRFNSMDIDSEENQLVKFRDLILYLNHYPVAWNKDLELDSSNPAMTDKLKSKIIELEINRSFPLYEGNERFATFAKYQIWGKKHLGKSIEKEYINASFTDEEITAYTYETDTCPELKDAHKKLADLKAAKGLFGKRKEKNESDIKKTETSIRELQHEPNPIKDKLIQRIEKNLLTVSYGRNQDRFMDFSARFLAEINYFGQDASFKMYHFYATDEQNSELEKYELPKDKKKYDSLKFHQGKLVHFISYKEHLKRYESWDDAFVIENNAIQLKLSFDGVENTVTIQRALLIYLLEDALRNIQNNTAENAGKQLLQEYYSHNKADLSAFKQILTQQDSIEPQQKTEFKKLLPRRLLNNYSPAINHLQTPHSSLPLILEKALLAEKRYCSLVVKAKAEGNYDDFIKRNKGKQFKLQFIRKAWNLMYFRNSYLQNVQAAGHHKSFHIERDEFNDFSRYMFAFEELSQYKYYLNEMFEKKGFFENNEFKILFQSGTSLENLYEKTKQKFEIWLASNTAKTNKPDNYHLNNYEQQFSNQLFFINLSHFINYLKSTGKLQTDANGQIIYEALNNVQYLIPEYYYTDKPERSESKSGNKLYNKLKATKLEDALLYEMAMCYLKADKQIADKAKHPITKLLTSDVEFNITNKEGIQLYHLLVPFKKIDAFIGLKMHKEQQDKKHPTSFLANIVNYLELVKNDKDIRKTYEAFSTNPVKRTLTYDDLAKIDGHLISKSIKFTNVTLELERYFIFKESLIVKKGNNIDFKYIKGLRNYYNNEKKKNEGIRNKAFHFGIPDSKSYDQLIRDAEVMFIANEVKPTHATKYTDLNKQLHTVCDKLMETVHNDYFSKEGDGKKKREAAGQKYFENIISAK

SEQ ID NO: 210 - protein, 1090 aa, Unknown
  Prevotella sp.
MNIPALVENQKKYFGTYSVMAMLNAQTVLDHIQKVADIEGEQNENNENLWFHPVMSHLYNAKNGYDKQPEKTMFIIERLQSYFPFLKIMAENQREYSNGKYKQNRVEVNSNDIFEVLKRAFGVLKMYRDLTNHYKTYEEKLIDGCEFLTSTEQPFSGMISKYYTVALRNTKERYGYKAEDLAFIQDNRYKFTKDAYGKRKSQVNTGSFLSLQDYNGDTTKKLHLSGVGIALLICLFLDKQYINLFLSRLPIFSSYNAQSEERRIIIRSFGINSIKQPKDRIHSEKSNKSVAMDMLNEVKRCPDELFTTLSAEKQSRFRIISDDHNEVLMKRSSDRFVPLLLQYIDYGKLFDHIRFHVNMGKLRYLLKADKTCIDGQTRVRVIEQPLNGFGRLEEVETMRKQENGTFGNSGIRIRDFENMKRDDANPANYPYIVETYTHYILENNKVEMFISDEENPTPLLPVIEDDRYVVKTIPSCRMSTLEIPAMAFHMFLFGSEKTEKLIIDVHDRYKRLFQAMQKEEVTAENIASFGIAESDLPQKIMDLISGNAHGKDVDAFIRLTVDDMLTDTERRIKRFKDDRKSIRSADNKMGKRGFKQISTGKLADFLAKDIVLFQPSVNDGENKITGLNYRIMQSAIAVYDSGDDYEAKQQFKLMFEKARLIGKGTTEPHPFLYKVFVRSIPANAVDFYERYLIERKFYLIGLSNEIKKGNRVDVPFIRRDQNKWKTPAMKTLGRIYSEDLPVELPRQMFDNEIKSHLKSLPQMEGIDFNNANVTYLIAEYMKRVLNDDFQTFYQWKRNYRYMDMLRGEYDRKGSLQHCFTSIEEREGLWKERASRTERYRKLASNKIRSNRQMRNASSEEIETILDKRLSNCRNEYQKSEKIIRRYRVQDALLFLLAKKTLTELADFDGERFKLKEIMPDAEKGILSEIMPMSFTFEKGGKIYTITSGGMKLKNYGDFFVLASDKRIGNLLELVGSNTVSKEDIMEEFKKYDQCRPEISSIVFNLEKWAFDTYPELPARVDRKEKVDFWSILDVLSNNKDINNEQSYILRKIRNAFDHNNYPDKGIVEIKALPEIAMSIKKAFGEYAIMK

SEQ ID NO: 211 - protein, 1090 aa, Unknown
  Prevotella sp.
MNIPALVENQKKYFGTYSVMAMLNAQTVLDHIQKVADIEGEQNENNENLWFHPVMSHLYNAKNGYDKQPEKTMFIIERLQSYFPFLKIMAENQREYSNGKYKQNRVEVNSNDIFEVLKRAFGVLKMYRDQASHYKTYDEKLIDGCEFLTSTEQPLSGMINNYYTVALRNMNERYGYKTEDLAFIQDKRFKFVKDAYGKKKSQVNTGFFLSLQDYNGDTQKKLHLSGVGIALLICLFLDKQYINIFLSRLPIFSSYNAQSEERRIIIRSFGINSIKQPKDRIHSEKSNKSVAMDMLNEIKRCPNELFETLSAEKQSRFRIISNDHNEVLMKRSSDRFVPLLLQYIDYGKLFDHIRFHVNMGKLRYLLKADKTCIDGQTRVRVIEQPLNGFGRLEEVETMRKQENGTFGNSGIRIRDFENMKRDDANPANYPYIVDTYTHYILENNKVEMFISDEETPAPLLPVIEDDRYVVKTIPSCRMSTLEIPAMAFHMFLFGSKKTEKLIVDVHNRYKRLFKAMQKEEVTAENIASFGIAESDLPQKIIDLISGNAHGKDVDAFIRLTVDDMLADTERRIKRFKDDRKSIRSADNKMGKRGFKQISTGKLADFLAKDIVLFQPSVNDGENKITGLNYRIMQSAIAVYNSGDDYEAKQQFKLMFEKARLIGKGTTEPHPFLYKVFVRSIPANAVDFYERYLIERKFYLIGLSNEIKKGNRVDVPFIRRDQNKWKTPAMKTLGRIYDEDLPVELPRQMFDNEIKSHLKSLPQMEGIDFNNANVTYLIAEYMKRVLNDDFQTFYQWKRNYRYMDMLRGEYDRKGSLQSCFTSVEEREGLWKERASRTERYRKLASNKIRSNRQMRNASSEEIETILDKRLSNSRNEYQKSEKVIRRYRVQDALLFLLAKKTLTELADFDGERFKLKEIMPDAEKGILSEIMPMSFTFEKGGKKYTITSEGMKLKNYGDFFVLASDKRIGNLLELVGSDTVSKEDIMEEFKKYDQCRPEISSIVFNLEKWAFDTYPELSARVDREEKVDFKSILKILLNNKNINKEQSDILRKIRNAFDHNNYPDKGVVEIRALPEIAMSIKKAFGEYAIMK

SEQ ID NO: 212 - protein, 1090 aa, Unknown
  Prevotella sp.
MNIPALVENQKKYFGTYSVMAMLNAQTVLDHIQKVADIEGEQNENNENLWFHPVMSHLYNAKNGYDKQPEKTMFIIERLQSYFPFLKIMAENQREYSNGKYKQNRVEVNSNDIFEVLKRAFGVLKMYRDLTNHYKTYEEKLNDGCEFLTSTEQPLSGMINNYYTVALRNMNERYGYKTEDLAFIQDKRFKFVKDAYGKKKSQVNTGFFLSLQDYNGDTQKKLHLSGVGIALLICLFLDKQYINIFLSRLPIFSSYNAQSEERRIIIRSFGINSIKLPKDRIHSEKSNKSVAMDMLNEVKRCPDELFTTLSAEKQSRFRIISDDHNEVLMKRSSDRFVPLLLQYIDYGKLFDHIRFHVNMGKLRYLLKADKTCIDGQTRVRVIEQPLNGFGRLEEAETMRKQENGTFGNSGIRIRDFENMKRDDANPANYPYIVDTYTHYILENNKVEMFINDKEDSAPLLPVIEDDRYVVKTIPSCRMSTLEIPAMAFHMFLFGSKKTEKLIVDVHNRYKRLFQAMQKEEVTAENIASFGIAESDLPQKILDLISGNAHGKDVDAFIRLTVDDMLTDTERRIKRFKDDRKSIRSADNKMGKRGFKQISTGKLADFLAKDIVLFQPSVNDGENKITGLNYRIMQSAIAVYDSGDDYEAKQQFKLMFEKARLIGKGTTEPHPFLYKVFARSIPANAVEFYERYLIERKFYLTGLSNEIKKGNRVDVPFIRRDQNKWKTPAMKTLGRIYSEDLPVELPRQMFDNEIKSHLKSLPQMEGIDFNNANVTYLIAEYMKRVLDDDFQTFYQWNRNYRYMDMLKGEYDRKGSLQHCFTSVEEREGLWKERASRTERYRKQASNKIRSNRQMRNASSEEIETILDKRLSNSRNEYQKSEKVIRRYRVQDALLFLLAKKTLTELADFDGERFKLKEIMPDAEKGILSEIMPMSFTFEKGGKKYTITSEGMKLKNYGDFFVLASDKRIGNLLELVGSDIVSKEDIMEEFNKYDQCRPEISSIVFNLEKWAFDTYPELSARVDREEKVDFKSILKILLNNKNINKEQSDILRKIRNAFDHNNYPDKGVVEIKALPEIAMSIKKAFGEYAIMK

SEQ ID NO: 213 - protein, 1090 aa, Unknown
  Prevotella sp.
MNIPALVENQKKYFGTYSVMAMLNAQTVLDHIQKVADIEGEQNENNENLWFHPVMSHLYNAKNGYDKQPEKTMFIIERLQSYFPFLKIMAENQREYSNGKYKQNRVEVNSNDIFEVLKRAFGVLKMYRDLTNHYKTYEEKLIDGCEFLTSTEQPLSGMISKYYTVALRNTKERYGYKTEDLAFIQDNIKKITKDAYGKRKSQVNTGFFLSLQDYNGDTQKKLHLSGVGIALLICLFLDKQYINIFLSRLPIFSSYNAQSEERRIIIRSFGINSIKLPKDRIHSEKSNKSVAMDMLNEVKRCPDELFTTLSAEKQSRFRIISDDHNEVLMKRSTDRFVPLLLQYIDYGKLFDHIRFHVNMGKLRYLLKADKTCIDGQTRVRVIEQPLNGFGRLEEAETMRKQENGTFGNSGIRIRDFENVKRDDANPANYPYIVDTYTHYILENNKVEMFISDKGSSAPLLPLIEDDRYVVKTIPSCRMSTLEIPAMAFHMFLFGSKKTEKLIVDVHNRYKRLFQAMQKEEVTAENIASFGIAESDLPQKILDLISGNAHGKDVDAFIRLTVDDMLTDTERRIKRFKDDRKSIRSADNKMGKRGFKQISTGKLADFLAKDIVLFQPSVNDGENKITGLNYRIMQSAIAVYDSGDDYEAKQQFKLMFEKARLIGKGTTEPHPFLYKVFARSIPANAVDFYERYLIERKFYLTGLCNEIKRGNRVDVPFIRRDQNKWKTPAMKTLGRIYSEDLPVELPRQMFDNEIKSHLKSLPQMEGIDFNNANVTYLIAEYMKRVLNDDFQTFYQWKRNYHYMDMLKGEYDRKGSLQHCFTSVEEREGLWKERASRTERYRKLASNKIRSNRQMRNASSEEIETILDKRLSNCRNEYQKSEKVIRRYRVQDALLFLLAKKTLTELADFDGERFKLKEIMPDAEKGILSEIMPMSFTFEKGGKKYTITSEGMKLKNYGDFFVLASDKRIGNLLELVGSDIVSKEDIMEEFNKYDQCRPEISSIVFNLEKWAFDTYPELSARVDREEKVDFKSILKILLNNKNINKEQSDILRKIRNAFDHNNYPDKGIVEIKALPEIAMSIKKAFGEYAIMK

SEQ ID NO: 214 - protein, 1199 aa, Capnocytophaga canimorsus
MKNIQRLGKGNEFSPFKKEDKFYFGGFLNLANNNIEDFFKEIITRFGIVITDENKKPKETFGEKILNEIFKKDISIVDYEKWVNIFADYFPFTKYLSLYLEEMQFKNRVICFRDVMKELLKTVEALRNFYTHYDHEPIKIEDRVFYFLDKVLLDVSLTVKNKYLKTDKTKEFLNQHIGEELKELCKQRKDYLVGKGKRIDKESEIINGIYNNAFKDFICKREKQDDKENHNSVEKILCNKEPQNKKQKSSATVWELCSKSSSKYTEKSFPNRENDKHCLEVPISQKGIVFLLSFFLNKGEIYALTSNIKGFKAKITKEEPVTYDKNSIRYMATHRMFSFLAYKGLKRKIRTSEINYNEDGQASSTYEKETLMLQMLDELNKVPDVVYQNLSEDVQKTFIEDWNEYLKENNGDVGTMEEEQVIHPVIRKRYEDKFNYFAIRFLDEFAQFPTLRFQVHLGNYLCDKRTKQICDTTTEREVKKKITVFGRLSELENKKAIFLNEREEIKGWEVFPNPSYDFPKENISVNYKDFPIVGSILDREKQPVSNKIGIRVKIADELQREIDKAIKEKKLRNPKNRKANQDEKQKERLVNEIVSTNSNEQGEPVVFIGQPTAYLSMNDIHSVLYEFLINKISGEALETKIVEKIETQIKQIIGKDATTKILKPYTNANSNSINREKLLRDLEQEQQILKTLLEEQQQREKDKKDKKSKRKHELYPSEKGKVAVWLANDIKRFMPKAFKEQWRGYHHSLLQKYLAYYEQSKEELKNLLPKEVFKHFPFKLKGYFQQQYLNQFYTDYLKRRLSYVNELLLNIQNFKNDKDALKATEKECFKFFRKQNYIINPINIQIQSILVYPIFLKRGFLDEKPTMIDREKFKENKDTELADWFMHYKNYKEDNYQKFYAYPLEKVEEKEKFKRNKQINKQKKNDVYTLMMVEYIIQKIFGDKFVEENPLVLKGIFQSKAERQQNNTHAATTQERNLNGILNQPKDIKIQGKITVKGVKLKDIGNFRKYEIDQRVNTFLDYEPRKEWMAYLPNDWKEKEKQGQLPPNNVIDRQISKYETVRSKILLKDVQELEKIISDEIKEEHRHDLKQGKYYNFKYYILNGLLRQLKNENVENYKVFKLNTNPEKVNITQLKQEATDLEQKAFVLTYIRNKFAHNQLPKKEFWDYCQEKYGKIEKEKTYAEYFAEVFKREKEALIK

SEQ ID NO: 215 - protein, 1131 aa, Phaeodactylibacter xiamenensis
MTNTPKRRTLHRHPSYFGAFLNIARHNAFMIMEHLSTKYDMEDKNTLDEAQLPNAKLFGCLKKRYGKPDVTEGVSRDLRRYFPFLNYPLFLHLEKQQNAEQAATYDINPEDIEFTLKGFFRLLNQMRNNYSHYISNTDYGKFDKLPVQDIYEAAIFRLLDRGKHTKRFDVFESKHTRHLESNNSEYRPRSLANSPDHENTVAFVTCLFLERKYAFPFLSRLDCFRSTNDAAEGDPLIRKASHECYTMFCCRLPQPKLESSDILLDMVNELGRCPSALYNLLSEEDQARFHIKREEITGFEEDPDEELEQEIVLKRHSDRFPYFALRYFDDTEAFQTLRFDVYLGRWRTKPVYKKRIYGQERDRVLTQSIRTFTRLSRLLPIYENVKHDAVRQNEEDGKLVNPDVTSQFHKSWIQIESDDRAFLSDRIEHFSPHYNFGDQVIGLKFINPDRYAAIQNVFPKLPGEEKKDKDAKLVNETADAIISTHEIRSLFLYHYLSKKPISAGDERRFIQVDTETFIKQYIDTIKLFFEDIKSGELQPIADPPNYQKNEPLPYVRGDKEKTQEERAQYRERQKEIKERRKELNTLLQNRYGLSIQYIPSRLREYLLGYKKVPYEKLALQKLRAQRKEVKKRIKDIEKMRTPRVGEQATWLAEDIVFLTPPKMHTPERKTTKHPQKLNNDQFRIMQSSLAYFSVNKKAIKKFFQKETGIGLSNRETSHPFLYRIDVGRCRGILDFYTGYLKYKMDWLDDAIKKVDNRKHGKKEAKKYEKYLPSSIQHKTPLELDYTRLPVYLPRGLFKKAIVKALAAHADFQVEPEEDNVIFCLDQLLDGDTQDFYNWQRYYRSALTEKETDNQLVLAHPYAEQILGTIKTLEGKQKNNKLGNKAKQKIKDELIDLKRAKRRLLDREQYLRAVQAEDRALWLMIQERQKQKAEHEEIAFDQLDLKNITKILTESIDARLRIPDTKVDITDKLPLRRYGDLRRVAKDRRLVNLASYYHVAGLSEIPYDLVKKELEEYDRRRVAFFEHVYQFEKEVYDRYAAELRNENPKGESTYFSHWEYVAVAVKHSADTHFNELFKEKVMQLRNKFHHNEFPYFDWLLPEVEKASAALYADRVFDVAEGYYQKMRKLMRQ

SEQ ID NO: 216 - protein, 1135 aa, Porphyromonas gingivalis
MNTVPASENKGQSRTVEDDPQYFGLYLNLARENLIEVESHVRIKFGKKKLNEESLKQSLLCDHLLSVDRWTKVYGHSRRYLPFLHYFDPDSQIEKDHDSKTGVDPDSAQRLIRELYSLLDFLRNDFSHNRLDGTTFEHLEVSPDISSFITGTYSLACGRAQSRFADFFKPDDFVLAKNRKEQLISVADGKECLTVSGLAFFICLFLDREQASGMLSRIRGFKRTDENWARAVHETFCDLCIRHPHDRLESSNTKEALLLDMLNELNRCPRILYDMLPEEERAQFLPALDENSMNNLSENSLNEESRLLWDGSSDWAEALTKRIRHQDRFPYLMLRFIEEMDLLKGIRFRVDLGEIELDSYSKKVGRNGEYDRTITDHALAFGKLSDFQNEEEVSRMISGEASYPVRFSLFAPRYAIYDNKIGYCHTSDPVYPKSKTGEKRALSNPQSMGFISVHNLRKLLLMELLCEGSFSRMQSDFLRKANRILDETAEGKLQFSALFPEMRHRFIPPQNPKSKDRREKAETTLEKYKQEIKGRKDKLNSQLLSAFDMNQRQLPSRLLDEWMNIRPASHSVKLRTYVKQLNEDCRLRLRKFRKDGDGKARAIPLVGEMATFLSQDIVRMIISEETKKLITSAYYNEMQRSLAQYAGEENRRQFRAIVAELHLLDPSSGHPFLSATMETAHRYTEDFYKCYLEKKREWLAKTFYRPEQDENTKRRISVFFVPDGEARKLLPLLIRRRMKEQNDLQDWIRNKQAHPIDLPSHLFDSKIMELLKVKDGKKKWNEAFKDWWSTKYPDGMQPFYGLRRELNIHGKSVSYIPSDGKKFADCYTHLMEKTVQDKKRELRTAGKPVPPDLAADIKRSFHRAVNEREFMLRLVQEDDRLMLMAINKMMTDREEDILPGLKNIDSILDEENQFSLAVHAKVLEKEGEGGDNSLSLVPATIEIKSKRKDWSKYIRYRYDRRVPGLMSHFPEHKATLDEVKTLLGEYDRCRIKIFDWAFALEGAIMSDRDLKPYLHESSSREGKSGEHSTLVKMLVEKKGCLTPDESQYLILIRNKAAHNQFPCAAEMPLIYRDVSAKVGSIEGSSAKDLPEGSSLVDSLWKKYEMIIRKILPILDPENRFFGKLLNNMSQPINDL

SEQ ID NO: 217 - protein, 1135 aa, Porphyromonas gingivalis
MNTVPASENKGQSRTVEDDPQYFGLYLNLARENLIEVESHVRIKFGKKKLNEESLKQSLLCDHLLSVDRWTKVYGHSRRYLPFLHYFDPDSQIEKDHDSKTGVDPDSAQRLIRELYSLLDFLRNDFSHNRLDGTTFEHLEVSPDISSFITGTYSLACGRAQSRFADFFKPDDFVLAKNRKEQLISVADGKECLTVSGLAFFICLFLDREQASGMLSRIRGFKRTNENWARAVHETFCDLCIRHPHDRLESSNTKEALLLDMLNELNRCPRILYDMLPEEERAQFLPALDENSMNNLSENSLNEESRLLWDGSSDWAEALTKRIRHQDRFPYLMLRFIEEMDLLKGIRFRVDLGEIELDSYSKKVGRNGEYDRTITDHALAFGKLSDFQNEEEVSRMISGEASYPVRFSLFAPRYAIYDNKIGYCHTSDPVYPKSKTGEKRALSNPQSMGFISVHDLRKLLLMELLCEGSFSRMQSGFLRKANRILDETAEGKLQFSALFPEMRHRFIPPQNPKSKDRREKAETTLEKYKQEIKGRKDKLNSQLLSAFDMNQRQLPSRLLDEWMNIRPASHSVKLRTYVKQLNEDCRLRLRKFRKDGDGKARAIPLVGEMATFLSQDIVRMIISEETKKLITSAYYNEMQRSLAQYAGEENRRQFRAIVAELHLLDPSSGHPFLSATMETAHRYTEDFYKCYLEKKREWLAKTFYRPEQDENTKRRISVFFVPDGEARKLLPLLIRRRMKEQNDLQDWIRNKQAHPIDLPSHLFDSKIMELLKVKDGKKKWNEAFKDWWSTKYPDGMQPFYGLRRELNIHGKSVSYIPSDGKKFADCYTHLMEKTVQDKKRELRTAGKPVPPDLAADIKRSFHRAVNEREFMLRLVQEDDRLMLMAINKMMTDREEDILPGLKNIDSILDKENQFSLAVHAKVLEKEGEGGDNSLSLVPATIEIKSKRKDWSKYIRYRYDRRVPGLMSHFPEHKATLDEVKTLLGEYDRCRIKIFDWAFALEGAIMSDRDLKPYLHESSSREGKSGEHSTLVKMLVEKKGCLTPDESQYLILIRNKAAHNQFPCAAEMPLIYRDVSAKVGSIEGSSAKDLPEGSSLVDSLWKKYEMIIRKILPILDHENRFFGKLLNNMSQPINDL

SEQ ID NO: 218 - protein, 1135 aa, Porphyromonas gingivalis
MNTVPASENKGQSRTVEDDPQYFGLYLNLARENLIEVESHVRIKFGKKKLNEESLKQSLLCDHLLSVDRWTKVYGHSRRYLPFLHYFDPDSQIEKDHDSKTGVDPDSAQRLIRELYSLLDFLRNDFSHNRLDGTTFEHLEVSPDISSFITGTYSLACGRAQSRFAVFFKPDDFVLAKNRKEQLISVADGKECLTVSGFAFFICLFLDREQASGMLSRIRGFKRTDENWARAVHETFCDLCIRHPHDRLESSNTKEALLLDMLNELNRCPRILYDMLPEEERAQFLPALDENSMNNLSENSLDEESRLLWDGSSDWAEALTKRIRHQDRFPYLMLRFIEEMDLLKGIRFRVDLGEIELDSYSKKVGRNGEYDRTITDHALAFGKLSDFQNEEEVSRMISGEASYPVRFSLFAPRYAIYDNKIGYCHTSDPVYPKSKTGEKRALSNPQSMGFISVHDLRKLLLMELLCEGSFSRMQSDFLRKANRILDETAEGKLQFSALFPEMRHRFIPPQNPKSKDRREKAETTLEKYKQEIKGRKDKLNSQLLSAFDMDQRQLPSRLLDEWMNIRPASHSVKLRTYVKQLNEDCRLRLRKFRKDGDGKARAIPLVGEMATFLSQDIVRMIISEETKKLITSAYYNEMQRSLAQYAGEENRRQFRAIVAELRLLDPSSGHPFLSATMETAHRYTEGFYKCYLEKKREWLAKIFYRPEQDENTKRRISVFFVPDGEARKLLPLLIRRRMKEQNDLQDWIRNKQAHPIDLPSHLFDSKVMELLKVKDGKKKWNEAFKDWWSTKYPDGMQPFYGLRRELNIHGKSVSYIPSDGKKFADCYTHLMEKTVRDKKRELRTAGKPVPPDLAADIKRSFHRAVNEREFMLRLVQEDDRLMLMAINKMMTDREEDILPGLKNIDSILDEENQFSLAVHAKVLEKEGEGGDNSLSLVPATIEIKSKRKDWSKYIRYRYDRRVPGLMSHFPEHKATLDEVKTLLGEYDRCRIKIFDWAFALEGAIMSDRDLKPYLHESSSREGKSGEHSTLVKMLVEKKGCLTPDESQYLILIRNKAAHNQFPCAAEMPLIYRDVSAKVGSIEGSSAKDLPEGSSLVDSLWKKYEMIIRKILPILDPENRFFGKLLNNMSQPINDL

SEQ ID NO: 219 - protein, 1135 aa, Porphyromonas gingivalis
MNTVPASENKGQSRTVEDDPQYFGLYLNLARENLIEVESHVRIKFGKKKLNEESLKQSLLCDHLLSVDRWTKVYGHSRRYLPFLHYFDPDSQIEKDHDSKTGVDPDSAQRLIRELYSLLDFLRNDFSHNRLDGTTFEHLEVSPDISSFITGTYSLACGRAQSRFADFFKPDDFVLAKNRKEQLISVADGKECLTVSGLAFFICLFLDREQASGMLSRIRGFKRTDENWARAVHETFCDLCIRHPHDRLESSNTKEALLLDMLNELNRCPRILYDMLPEEERAQFLPALDENSMNNLSENSLNEESRLLWDGSSDWAEALTKRIRHQDRFPYLMLRFIEEMDLLKGIRFRVDLGEIELDSYSKKVGRNGEYDRTITDHALAFGKLSDFQNEEEVSRMISGEASYPVRFSLFAPRYAIYDNKIGYCHTSDPVYPKSKTGEKRALSNPQSMGFISVHDLRKLLLMELLCEGSFSRMQSGFLRKANRILDETAEGKLQFSALFPEMRHRFIPPQNPKSKDRREKAETTLEKYKQEIKGRKDKLNSQLLSAFDMNQRQLPSRLLDEWMNIRPASHSVKLRTYVKQLNEDCRLRLRKFRKDGDGKARAIPLVGEMATFLSQDIVRMIISEETKKLITSAYYNEMQRSLAQYAGEENRRQFRAIVAELHLLDPSSGHPFLSATMETAHRYTEDFYKCYLEKKREWLAKTFYRPEQDENTKRRISVFFVPDGEARKLLPLLIRRRMKEQNDLQDWIRNKQAHPIDLPSHLFDSKIMELLKVKDGKKKWNEAFKDWWSTKYPDGMQPFYGLRRELNIHGKSVSYIPSDGKKFADCYTHLMEKTVQDKKRELRTAGKPVPPDLAADIKRSFHRAVNEREFMLRLVQEDDRLMLMAINKMMTDREEDILPGLKNIDSILDEENQFSLAVHAKVLEKEGEGGDNSLSLVPATIEIKSKRKDWSKYIRYRYDRRVPGLMSHFPEHKATLDEVKTLLGEYDRCRIKIFDWAFALEGAIMSDRDLKPYLHESSSREGKSGEHSTLVKMLVEKKGCLTPDESQYLILIRNKAAHNQFPCAAEMPLIYRDVSAKVGSIEGSSAKDLPEGSSLVDSLWKKYEMIIRKILPILDHENRFFGKLLNNMSQPINDL

SEQ ID NO: 220 - protein, 1135 aa, Porphyromonas gingivalis; identical to SEQ ID NO: 219

SEQ ID NO: 221 - protein, 1135 aa, Porphyromonas gingivalis
MNTVPASENKGQSRTVEDDPQYFGLYLNLARENLIEVESHVRIKFGKKKLNEESLKQSLLCDHLLSVDRWTKVYGHSRRYLPFLHYFDPDSQIEKDHDSKTGVDPDSAQRLIRELYSLLDFLRNDFSHNRLDGTTFEHLEVSPDISSFITGTYSLACGRAQSRFADFFKPDDFVLAKNRKEQLISVADGKECLTVSGLAFFICLFLDREQASGMLSRIRGFKRTDENWARAVHETFCDLCIRHPHDRLESSNTKEALLLDMLNELNRCPRILYDMLPEEERAQFLPALDENSMNNLSENSLNEESRLLWDGSSDWAEALTKRIRHQDRFPYLMLRFIEEMDLLKGIRFRVDLGEIELDSYSKKVGRNGEYDRTITDHALAFGKLSDFQNEEEVSRMISGEASYPVRFSLFAPRYAIYDNKIGYCHTSDPVYPKSKTGEKRALSNPRSMGFISVHDLRKLLLMELLCEGSFSRMQSDFLRKANRILDETAEGKLQFSALFPEMRHRFIPPQNPKSKDRREKAETTLEKYKQEIKGRKDKLNSQLLSAFDMNQRQLPSRLLDEWMNIRPASHSVKLRTYVKQLNEDCRLRLRKFRKDGDGKARAIPLVGEMATFLSQDIVRMIISEETKKLITSAYYNEMQRSLAQYAGEENRRQFRAIVAELHLLDPSSGHPFLSATMETAHRYTEDFYKCYLEKKREWLAKTFYRPEQDENTKRRISVFFVPDGEARKLLPLLIRRRMKEQNDLQDWIRNKQAHPIDLPSHLFDSKIMELLKVKDGKKKWNEAFKDWWSTKYPDGMQPFYGLRRELNIHGKSVSYIPSDGKKFADCYTHLMEKTVQDKKRELRTAGKPVPPDLAADIKRSFHRAVNEREFMLRLVQEDDRLMLMAINKMMTDREEDILPGLKNIDSILDEENQFSLAVHAKVLEKEGEGGDNSLSLVPATIEIKSKRKDWSKYIRYRYDRRVPGLMSHFPEHKATLDEVKTLLGEYDRCRIKIFDWAFALEGAIMSDRDLKPYLHESSSREGKSGEHSTLVKMLVEKKGCLTPDESQYLILIRNKAAHNQFPCAAEMPLIYRDVSAKVGSIEGSSAKDLPEGSSLVDSLWKKYEMIIRKILPILDPENRFFGKLLNNMSQPINDL

SEQ ID NO: 222 - protein, 1135 aa, Porphyromonas gingivalis
MNTVPASENKGQSRTVEDDPQYFGLYLNLARENLIEVESHVRIKFGKKKLNEESLKQSLLCDHLLSVDRWTKVYGHSRRYLPFLHYFDPDSQIEKDHDSKTGVDPDSAQRLIRELYSLLDFLRNDFSHNRLDGTTFEHLEVSPDISSFITGTYSLACGRAQSRFADFFKPDDFVLAKNRKEQLISVADGKECLTVSGLAFFICLFLDREQASGMLSRIRGFKRTDENWARAVHETFCDLCIRHPHDRLESSNTKEALLLDMLNELNRCPRILYDMLPEEERAQFLPALDENSMNNLSENSLNEESRLLWDGSSDWAEALTKRIRHQDRFPYLMLRFIEEMDLLKGIRFRVDLGEIELDSYSKKVGRNGEYDRTITDHALAFGKLSDFQNEEEVSRMISGEASYPVRFSLFAPRYAIYDNKIGYCHTSDPVYPKSKTGEKRALSNPRSMGFISVHDLRKLLLMELLCEGSFSRMQSDFLRKANRILDETAEGKLQFSALFPEMRHRFIPPQNPKSKDRREKAETTLEKYKQEIKGRKDKLNSQLLSAFDMDQRQLPSRLLDEWMNIRPASHSVKLRTYVKQLNEDCRLRLQKFRKDGDGKARAIPLVGEMATFLSQDIVRMIISEETKKLITSAYYNEMQRSLAQYAGEENRHQFRAIVAELRLLDPSSGHPFLSATMETAHRYTEDFYKCYLEKKREWLAKTFYRPEQDENTKRRISVFFVPDGEARKLLPLLIRRRMKEQNDLQDWIRNKQAHPIDLPSHLFDSKIMELLKVKDGKKKWNEAFKDWWSTKYPDGMQPFYGLRRELNIHGKSVSYIPSDGKKFADCYTHLMEKTVQDKKRELRTAGKPVPPDLAADIKRSFHRAVNEREFMLRLVQEDDRLMLMAINKMMTDREEDILPGLKNIDSILDEENQFSLAVHAKVLEKEGEGGDNSLSLVPATIEIKSKRKDWSKYIRYRYDRRVPGLMSHFPEHKATLDEVKTLLGEYDRCRIKIFDWAFALEGAIMSDRDLKPYLHESSSREGKSGEHSTLVKMLVEKKGCLTPDESQYLILIRNKAAHNQFPCAAEMPLIYRDVSAKVGSIEGSSAKDLPEGSSLVDSLWKKYEMIIRKILPILDPENRFFGKLLNNMSQPINDL

SEQ ID NO: 223 - protein, 1135 aa, Porphyromonas gingivalis
MNTVPASENKGQSRTVEDDPQYFGLYLNLARENLIEVESHVRIKFGKKKLNEESLKQSLLCDHLLSVDRWTKVYGHSRRYLPFLHYFDPDSQIEKDHDSKTGVDPDSAQRLIRELYSLLDFLRNDFSHNRLDGTTFEHLEVSPDISSFITGTYSLACGRAQSRFADFFKPDDFVLAKNRKEQLISVADGKECLTVSGLAFFICLFLDREQASGMLSRIRGFKRTDENWARAVHETFCDLCIRHPHDRLESSNTKEALLLDMLNELNRCPRILYDMLPEEERAQFLPALDENSMNNLSENSLNEESRLLWDGSSDWAEALTKRIRHQDRFPYLMLRFIEEMDLLKGIRFRVDLGEIELDSYSKKVGRNGEYDRTITDHALAFGKLSDFQNEEEVSRMISGEASYPVRFSLFAPRYAIYDNKIGYCHTSDPVYPKSKTGEKRALSNPRSMGFISVHDLRKLLLMELLCEGSFSRMQSDFLRKANRILDETAEGKLQFSALFPEMRHRFIPPQNPKSKDRREKAETTLEKYKQEIKGRKDKLNSQLLSAFDMDQRQLPSRLLDEWMNIRPASHSVKLRTYVKQLNEDCRLRLQKFRKDGDGKARAIPLVGEMATFLSQDIVRMIISEETKKLITSAYYNEMQRSLAQYAGEENRHQFRAIVAELRLLDPSSGHPFLSATMETAHRYTEDFYKCYLEKKREWLAKTFYRPEQDENTKRRISVFFVPDGEARKLLPLLIRRRMKEQNDLQDWIRNKQAHPIDLPSHLFDSKVMELLKVKDGKKKWNEAFKDWWSTKYPDGMQPFYGLRRELNIHGKSVSYIPSDGKKFADCYTHLMEKTVRDKKRELRTAGKPVPPDLAAYIKRSFHRAVNEREFMLRLVQEDDRLMLMAINKIMTDREEDILPGLKNIDSILDKENQFSLAVHAKVLEKEGEGGDNSLSLVPATIEIKSKRKDWSKYIRYRYDRRVPGLMSHFPEHKATLDEVKTLLGEYDRCRIKIFDWAFALEGAIMSDRDLKPYLHESSSREGKSGEHSTLVKMLVEKKGCLTPDESQYLILIRNKAAHNQFPCAAEIPLIYRDVSAKVGSIEGSSAKDLPEGSSLVDSLWKKYEMIIRKILPILDPENRFFGKLLNNMSQPINDL

SEQ ID NO: 224 - protein, 1135 aa, Porphyromonas gingivalis; identical to SEQ ID NO: 223

SEQ ID NO: 225 - protein, 1135 aa, Porphyromonas gingivalis; identical to SEQ ID NO: 222

SEQ ID NO: 226 - protein, 1135 aa, Porphyromonas gingivalis
MNTVPASENKGQSRTVEDDPQYFGLYLNLARENLIEVESHVRIKFGKKKLNEESLKQSLLCDHLLSVDRWTKVYGHSRRYLPFLHYFDPDSQIEKDHDSKTGVDPDSAQRLIRELYSLLDFLRNDFSHNRLDGTTFEHLEVSPDISSFITGTYSLACGRAQSRFADFFKPDDFVLAKNRKEQLISVADGKECLTVSGLAFFICLFLDREQASGMLSRIRGFKRTDENWARAVHETFCDLCIRHPHDRLESSNTKEALLLDMLNELNRCPRILYDMLPEEERAQFLPALDENSMNNLSENSLNEESRLLWDGSSDWAEALTKRIRHQDRFPYLMLRFIEEMDLLKGIRFRVDLGEIELDSYSKKVGRNGEYDRTITDHALAFGKLSDFQNEEEVSRMISGEASYPVRFSLFAPRYAIYDNKIGYCHTSDPVYPKSKTGEKRALSNPQSMGFISVHDLRKLLLMELLCEGSFSRMQSGFLRKANRILDETAEGKLQFSALFPEMRHRFIPPQNPKSKDRREKAETTLEKYKQEIKGRKDKLNSQLLSAFDMNQRQLPSRLLDEWMNIRPASHSVKLRTYVKQLNEDCRLRLRKFRKDGDGKARAIPLVGEMATFLSQDIVRMIISEETKKLITSAYYNEMQRSLAQYAGEENRRQFRAIVAELHLLDPSSGHPFLSATMETAHRYTEDFYKCYLEKKREWLAKTFYRPEQDENTKRRISVFFVPDGEARKLLPLLIRRRMKEQNDLQDWIRNKQAHPIDLPSHLFDSKIMELLKVKDGKKKWNEAFKDWWSTKYPDGMQPFYGLRRELNIHGKSVSYIPSDGKKFADCYTHLMEKTVQDKKRELRTAGKPVPPDLAADIKRSFHRAVNEREFMLRLVQEDDRLMLMAINKMMTDREEDILPGLKNIDSILDKENQFSLAVHAKVLEKEGEGGDNSLSLVPATIEIKSKRKDWSKYIRYRYDRRVPGLMSHFPEHKATLDEVKTLLGEYDRCRIKIFDWAFALEGAIMSDRDLKPYLHESSSREGKSGEHSTLVKMLVEKKGCLTPDESQYLILIRNKAAHNQFPCAAEMPLIYRDVSAKVGSIEGSSAKDLPEGSSLVDSLWKKYEMIIRKILPILDPENRFFGKLLNNMSQPINDL

SEQ ID NO: 227 - protein, 1135 aa, Porphyromonas gulae
MNTVPATENKGQSRTVEDDPQYFGLYLNLARENLIEVESHVRIKFGKKKLNEESLKQSLLCDHLLSIDRWTKVYGHSRRYLPFLHCFDPDSGIEKDHDSKTGVDPDSAQRLIRELYSLLDFLRNDFSHNRLDGTTFEHLKVSPDISSFITGAYTFACERAQSRFADFFKPDDFLLAKNRKEQLISVADGKECLTVSGFAFFICLFLDREQASGMLSRIRGFKRTDENWARAVHETFCDLCIRHPHDRLESSNTKEALLLDMLNELNRCPRILYDMLPEEERAQFLPALDENSMNNLSENSLNEESRLLWDGSSDWAEALTKRIRHQDRFPYLMLRFIEEMDLLKGIRFRVDLGEIELDSYSKKVGRNGEYDRTITDHALAFGKLSDFQNEEEVSRMISGEASYPVRFSLFAPRYAIYDNKIGYCHTSDPVYPKSKTGEKRALSNPQSMGFISVHDLRKLLLMELLCEGSFSRMQSDFLRKANRILDETAEGKLQFSALFPEMRHRFIPPQNPKSKDRREKAETTLEKYKQEIKGRKDKLNSQLLSAFDMNQRQLPSRLLDEWMNIRPASHSVKLRTYVKQLNEDCRLRLRKFRKDGDGKARAIPLVGEMATFLSQDIVRMIISEETKKLITSAYYNEMQRSLAQYAGEENRRQFRAIVAELHLLDPSSGHPFLSATMETAHRYTEDFYKCYLEKKREWLAKTFYRPEQDENTKRRISVFFVPDGEARKLLPLLIRRRMKEQNDLQDWIRNKQAHPIDLPSHLFDSKIMELLKVKDGKKKWNEAFKDWWSTKYPDGMQPFYGLRRELNIHGKSVSYIPSDGKKFADCYTHLMEKTVRDKKRELRTAGKPVPPDLAAYIKRSFHRAVNEREFMLRLVQEDDRLMLMAINKMMTDREEDILPGLKNIDSILDEENQFSLAVHAKVLEKEGEGGDNSLSLVPATIEIKSKRKDWSKYIRYRYDRRVPGLMSHFPEHKATLDEVKTLLGEYDRCRIKIFDWAFALEGAIMSDRDLKPYLHESSSREGKSGEHSTLVKMLVEKKGCLTPDESQYLILIRNKAAHNQFPCAAEMPLIYRDVSAKVGSIEGSSAKDLPEGSSLVDSLWKKYEMIIRKILPILDHENRFFGKLLNNMSQPINDL

SEQ ID NO: 228 - protein, 1115 aa, Bacteroides pyogenes
MESIKNSQKSTGKTLQKDPPYFGLYLNMALLNVRKVENHIRKWLGDVALLPEKSGFHSLLTTDNLSSAKWTRFYYKSRKFLPFLEMFDSDKKSYENRRETTECLDTIDRQKISSLLKEVYGKLQDIRNAFSHYHIDDQSVKHTALIISSEMHRFIENAYSFALQKTRARFTGVFVETDFLQAEEKGDNKKFFAIGGNEGIKLKDNALIFLICLFLDREEAFKFLSRATGFKSTKEKGFLAVRETFCALCCRQPHERLLSVNPREALLMDMLNELNRCPDILFEMLDEKDQKSFLPLLGEEEQAHILENSLNDELCEAIDDPFEMIASLSKRVRYKNRFPYLMLRYIEEKNLLPFIRFRIDLGCLELASYPKKMGEENNYERSVTDHAMAFGRLTDFHNEDAVLQQITKGITDEVRFSLYAPRYAIYNNKIGFVRTGGSDKISFPTLKKKGGEGHCVAYTLQNTKSFGFISIYDLRKILLLSFLDKDKAKNIVSGLLEQCEKHWKDLSENLFDAIRTELQKEFPVPLIRYTLPRSKGGKLVSSKLADKQEKYESEFERRKEKLTEILSEKDFDLSQIPRRMIDEWLNVLPTSREKKLKGYVETLKLDCRERLRVFEKREKGEHPVPPRIGEMATDLAKDIIRMVIDQGVKQRITSAYYSEIQRCLAQYAGDDNRRHLDSIIRELRLKDTKNGHPFLGKVLRPGLGHTEKLYQRYFEEKKEWLEATFYPAASPKRVPRFVNPPTGKQKELPLIIRNLMKERPEWRDWKQRKNSHPIDLPSQLFENEICRLLKDKIGKEPSGKLKWNEMFKLYWDKEFPNGMQRFYRCKRRVEVFDKVVEYEYSEEGGNYKKYYEALIDEVVRQKISSSKEKSKLQVEDLTLSVRRVFKRAINEKEYQLRLLCEDDRLLFMAVRDLYDWKEAQLDLDKIDNMLGEPVSVSQVIQLEGGQPDAVIKAECKLKDVSKLMRYCYDGRVKGLMPYFANHEATQEQVEMELRHYEDHRRRVFNWVFALEKSVLKNEKLRRFYEESQGGCEHRRCIDALRKASLVSEEEYEFLVHIRNKSAHNQFPDLEIGKLPPNVTSGFCECIWSKYKAIICRIIPFIDPERRFFGKLLEQK

SEQ ID NO: 229 - protein, 1115 aa, Bacteroides pyogenes
MESIKNSQKSTGKTLQKDPPYFGLYLNMALLNVRKVENHIRKWLGDVALLPEKSGFHSLLTTDNLSSAKWTRFYYKSRKFLPFLEMFDSDKKSYENRRETAECLDTIDRQKISSLLKEVYGKLQDIRNAFSHYHIDDQSVKHTALIISSEMHRFIENAYSFALQKTRARFTGVFVETDFLQAEEKGDNKKFFAIGGNEGIKLKDNALIFLICLFLDREEAFKFLSRATGFKSTKEKGFLAVRETFCALCCRQPHERLLSVNPREALLMDMLNELNRCPDILFEMLDEKDQKSFLPLLGEEEQAHILENSLNDELCEAIDDPFEMIASLSKRVRYKNRFPYLMLRYIEEKNLLPFIRFRIDLGCLELASYPKKMGEENNYERSVTDHAMAFGRLTDFHNEDAVLQQITKGITDEVRFSLYAPRYAIYNNKIGFVRTSGSDKISFPTLKKKGGEGHCVAYTLQNTKSFGFISIYDLRKILLLSFLDKDKAKNIVSGLLEQCEKHWKDLSENLFDAIRTELQKEFPVPLIRYTLPRSKGGKLVSSKLADKQEKYESEFERRKEKLTEILSEKDFDLSQIPRRMIDEWLNVLPTSREKKLKGYVETLKLDCRERLRVFEKREKGEHPLPPRIGEMATDLAKDIIRMVIDQGVKQRITSAYYSEIQRCLAQYAGDDNRRHLDSIIRELRLKDTKNGHPFLGKVLRPGLGHTEKLYQRYFEEKKEWLEATFYPAASPKRVPRFVNPPTGKQKELPLIIRNLMKERPEWRDWKQRKNSHPIDLPSQLFENEICRLLKDKIGKEPSGKLKWNEMFKLYWDKEFPNGMQRFYRCKRRVEVFDKVVEYEYSEEGGNYKKYYEALIDEVVRQKISSSKEKSKLQVEDLTLSVRRVFKRAINEKEYQLRLLCEDDRLLFMAVRDLYDWKEAQLDLDKIDNMLGEPVSVSQVIQLEGGQPDAVIKAECKLKDVSKLMRYCYDGRVKGLMPYFANHEATQEQVEMELRHYEDHRRRVFNWVFALEKSVLKNEKLRRFYEESQGGCEHRRCIDALRKASLVSEEEYEFLVHIRNKSAHNQFPDLEIGKLPPNVTSGFCECIWSKYKAIICRIIPFIDPERRFFGKLLEQK

SEQ ID NO: 230 - protein, 953 aa, Unknown
  Prevotella sp.
MSNEIGAFREHQFAYAPGNEKQEEATFATYFNLALSNVEGMMFGEVESNPDKIEKSLDTLPPAILRQIASFIWLSKEDHPDKAYSTEEVKVIVTDLVRRLCFYRNYFSHCFYLDTQYFYSDELVDTTAIGEKLPYNFHHFITNRLFRYSLPEITLFRWNEGERKYEILRDGLIFFCCLFLKRGQAERFLNELRFFKRTDEEGRIKRTIFTKYCTRESHKHIGIEEQDFLIFQDIIGDLNRVPKVCDGVVDLSKENERYIKNRETSNESDENKARYRLLIREKDKFPYYLMRYIVDFGVLPCITFKQNDYSTKEGRGQFHYQDAAVAQEERCYNFVVRNGNVYYSYMPQAQNVVRISELQGTISVEELRNMVYASINGKDVNKSVEQYLYHLHLLYEKILTISGQTIKEGRVDVEDYRPLLDKLLLRPASNGEELRRELRKLLPKRVCDLLSNRFDCSEGVSAVEKRLKAILLRHEQLLLSQNPALHIDKIKSVIDYLYLFFSDDEKFRQQPTEKAHRGLKDEEFQMYHYLVGDYDSHPLALWKELEASGRLKPEMRKLTSATSLHGLYMLCLKGTVEWCRKQLMSIGKGTAKVEAIADRVGLKLYDKLKEYTPEQLEREVKLVVMHGYAAAATPKPKAQAAIPSKLTELRFYSFLGKREMSFAAFIRQDKKAQKLWLRNFYTVENIKTLQKRQAAADAACKKLYNLVGEVERVHTNDKVLVLVAQRYRERLLNVGSKCAVTLDNPERQQKLADVYEVQNAWLSIRFDDLDFTLTHVNLSNLRKAYNLIPRKHILAFKEYLDNRVKQKLCEECRNVRRKEDLCTCCSPRYSNLTSWLKENHSESSIEREAATMMLLDVERKLLSFLLDERRKAIIEYGKFIPFSALVKECRLADAGLCGIRNDVLHDNVISYADAIGKLSAYFPKEASEAVEYIRRTKEVREQRREELMANSSQ

SEQ ID NO: 231 - protein, 1150 aa, Flavobacterium branchiophilum
MENLNKILDKENEICISKIFNTKGIAAPITEKALDNIKSKQKNDLNKEARLHYFSIGHSFKQIDTKKVFDYVLIEELKDEKPLKFITLQKDFFTKEFSIKLQKLINSIRNINNHYVHNFNDINLNKIDSNVFHFLKESFELAIIEKYYKVNKKYPLDNEIVLFLKELFIKDENTALLNYFTNLSKDEAIEYILTFTITENKIWNINNEHNILNIEKGKYLTFEAMLFLITIFLYKNEANHLLPKLYDFKNNKSKQELFTFFSKKFTSQDIDAEEGHLIKFRDMIQYLNHYPTAWNNDLKLESENKNKIMTTKLIDSIIEFELNSNYPSFATDIQFKKEAKAFLFASNKKRNQTSFSNKSYNEEIRHNPHIKQYRDEIASALTPISFNVKEDKFKIFVKKHVLEEYFPNSIGYEKFLEYNDFTEKEKEDFGLKLYSNPKTNKLIERIDNHKLVKSHGRNQDRFMDFSMRFLAENNYFGKDAFFKCYKFYDTQEQDEFLQSNENNDDVKFHKGKVTTYIKYEEHLKNYSYWDCPFVEENNSMSVKISIGSEEKILKIQRNLMIYFLENALYNENVENQGYKLVNNYYRELKKDVEESIASLDLIKSNPDFKSKYKKILPKRLLHNYAPAKQDKAPENAFETLLKKADFREEQYKKLLKKAEHEKNKEDFVKRNKGKQFKLHFIRKACQMMYFKEKYNTLKEGNAAFEKKDPVIEKRKNKEHEFGHHKNLNITREEFNDYCKWMFAFNGNDSYKKYLRDLFSEKHFFDNQEYKNLFESSVNLEAFYAKTKELFKKWIETNKPTNNENRYTLENYKNLILQKQVFINVYHFSKYLIDKNLLNSENNVIQYKSLENVEYLISDFYFQSKLSIDQYKTCGKLFNKLKSNKLEDCLLYEIAYNYIDKKNVHKIDIQKILTSKIILTINDANTPYKISVPFNKLERYTEMIAIKNQNNLKARFLIDLPLYLSKNKIKKGKDSAGYEIIIKNDLEIEDINTINNKIINDSVKFTEVLMELEKYFILKDKCILSKNYIDNSEIPSLKQFSKVWIKENENEIINYRNIACHFHLPLLETFDNLLLNVEQKFIKEELQNVSTINDLSKPQEYLILLFIKFKHNNFYLNLFNKNESKTIKNDKEVKKNRVLQKFINQVILKKK

SEQ ID NO: 232 - protein, 1322 aa, Unknown
  Prevotella sp.
MSKECKKQRQEKKRRLQKANFSISLTGKHVFGAYFNMARTNFVKTINYILPIAGVRGNYSENQINKMLHALFLIQAGRNEELTTEQKQWEKKLRLNPEQQTKFQKLLFKHFPVLGPMMADVADHKAYLNKKKSTVQTEDETFAMLKGVSLADCLDIICLMADTLTECRNFYTHKDPYNKPSQLADQYLHQEMIAKKLDKVVVASRRILKDREGLSVNEVEFLTGIDHLHQEVLKDEFGNAKVKDGKVMKTFVEYDDFYFKISGKRLVNGYTVTTKDDKPVNVNTMLPALSDFGLLYFCVLFLSKPYAKLFIDEVRLFEYSPFDDKENMIMSEMLSIYRIRTPRLHKIDSHDSKATLAMDIFGELRRCPMELYNLLDKNAGQPFFHDEVKHPNSHTPDVSKRLRYDDRFPTLALRYIDETELFKRIRFQLQLGSFRYKFYDKENCIDGRVRVRRIQKEINGYGRMQEVADKRMDKWGDLIQKREERSVKLEHEELYINLDQFLEDTADSTPYVTDRRPAYNIHANRIGLYWEDSQNPKQYKVFDENGMYIPELVVTEDKKAPIKMPAPRCALSVYDLPAMLFYEYLREQQDNEFPSAEQVIIEYEDDYRKFFKAVAEGKLKPFKRPKEFRDFLKKEYPKLRMADIPKKLQLFLCSHGLCYNNKPETVYERLDRLTLQHLEERELHIQNRLEHYQKDRDMIGNKDNQYGKKSFSDVRHGALARYLAQSMMEWQPTKLKDKEKGHDKLTGLNYNVLTAYLATYGHPQVPEEGFTPRTLEQVLINAHLIGGSNPHPFINKVLALGNRNIEELYLHYLEEELKHIRSRIQSLSSNPSDKALSALPFIHHDRMRYHERTSEEMMALAARYTTIQLPDGLFTPYILEILQKHYTENSDLQNALSQDVPVKLNPTCNAAYLITLFYQTVLKDNAQPFYLSDKTYTRNKDGEKAESFSFKRAYELFSVLNNNKKDTFPFEMIPLFLTSDEIQERLSAKLLDGDGNPVPEVGEKGKPATDSQGNTIWKRRIYSEVDDYAEKLTDRDMKISFKGEWEKLPRWKQDKIIKRRDETRRQMRDELLQRMPRYIRDIKDNERTLRRYKTQDMVLFLLAEKMFTNIISEQSSEFNWKQMRLSKVCNEAFLRQTLTFRVPVTVGETTIYVEQENMSLKNYGEFYRFLTDDRLMSLLNNIVETLKPNENGDLVIRHTDLMSELAAYDQYRSTIFMLIQSIENLIITNNAVLDDPDADGFWVREDLPKRNNFASLLELINQLNNVELTDDERKLLVAIRNAFSHNSYNIDFSLIKDVKHLPEVAKGILQHLQSMLGVEITK

SEQ ID NO: 233 - protein, 1159 aa, Myroides odoratimimus
MKDILTTDTTEKQNRFYSHKIADKYFFGGYFNLASNNIYEVFEEVNKRNTFGKLAKRDNGNLKNYIIHVFKDELSISDFEKRVAIFASYFPILETVDKKSIKERNRTIDLTLSQRIRQFREMLISLVTAVDQLRNFYTHYHHSDIVIENKVLDFLNSSFVSTALHVKDKYLKTDKTKEFLKETIAAELDILIEAYKKKQIEKKNTRFKANKREDILNAIYNEAFWSFINDKDKDKDKETVVAKGADAYFEKNHHKSNDPDFALNISEKGIVYLLSFFLTNKEMDSLKANLTGFKGKVDRESGNSIKYMATQRIYSFHTYRGLKQKIRTSEEGVKETLLMQMIDELSKVPNVVYQHLSTTQQNSFIEDWNEYYKDYEDDVETDDLSRVIHPVIRKRYEDRFNYFAIRFLDEFFDFPTLRFQVHLGDYVHDRRTKQLGKVESDRIIKEKVTVFARLKDINSAKASYFHSLEEQDKEELDNKWTLFPNPSYDFPKEHTLQHQGEQKNAGKIGIYVKLRDTQYKEKAALEEARKSLNPKERSATKASKYDIITQIIEANDNVKSEKPLVFTGQPIAYLSMNDIHSMLFSLLTDNAELKKTPEEVEAKLIDQIGKQINEILSKDTDTKILKKYKDNDLKETDTDKITRDLARDKEEIEKLILEQKQRADDYNYTSSTKFNIDKSRKRKHLLFNAEKGKIGVWLANDIKRFMFKESKSKWKGYQHTELQKLFAYFDTSKSDLELILSNMVMVKDYPIELIDLVKKSRTLVDFLNKYLEARLEYIENVITRVKNSIGTPQFKTVRKECFTFLKKSNYTVVSLDKQVERILSMPLFIERGFMDDKPTMLEGKSYKQHKEKFADWFVHYKENSNYQNFYDTEVYEITTEDKREKAKVTKKIKQQQKNDVFTLMMVNYMLEEVLKLSSNDRLSLNELYQTKEERIVNKQVAKDTQERNKNYIWNKVVDLQLCDGLVHIDNVKLKDIGNFRKYENDSRVKEFLTYQSDIVWSAYLSNEVDSNKLYVIERQLDNYESIRSKELLKEVQEIECSVYNQVANKESLKQSGNENFKQYVLQGLLPIGMDVREMLILSTDVKFKKEEIIQLGQAGEVEQDLYSLIYIRNKFAHNQLPIKEFFDFCENNYRSISDNEYYAEYYMEIFRSIKEKYAN

SEQ ID NO: 234 - protein, 1157 aa, Myroides odoratimimus
MKDILTTDTTEKQNRFYSHKIADKYFFGGYFNLASNNIYEVFEEVNKRNTFGKLAKRDNGNLKNYIIHVFKDELSISDFEKRVAIFASYFPILETVDKKSIKERNRTIDLTLSQRIRQFREMLISLVTAVDQLRNFYTHYHHSEIVIENKVLDFLNSSLVSTALHVKDKYLKTDKTKEFLKETIAAELDILIEAYKKKQIEKKNTRFKANKREDILNAIYNEAFWSFINDKDKDKETVVAKGADAYFEKNHHKSNDPDFALNISEKGIVYLLSFFLTNKEMDSLKANLTGFKGKVDRESGNSIKYMATQRIYSFHTYRGLKQKIRTSEEGVKETLLMQMIDELSKVPNVVYQHLSTTQQNSFIEDWNEYYKDYEDDVETDDLSRVIHPVIRKRYEDRFNYFAIRFLDEFFDFPTLRFQVHLGDYVHDRRTKQLGKVESDRIIKEKVTVFARLKDINSAKASYFHSLEEQDKEELDNKWTLFPNPSYDFPKEHTLQHQGEQKNAGKIGIYVKLRDTQYKEKAALEEARKSLNPKERSATKASKYDIITQIIEANDNVKSEKPLVFTGQPIAYLSMNDIHSMLFSLLTDNAELKKTPEEVEAKLIDQIGKQINEILSKDTDTKILKKYKDNDLKETDTDKITRDLARDKEEIEKLILEQKQRADDYNYTSSTKFNIDKSRKRKHLLFNAEKGKIGVWLANDIKRFMFKESKSKWKGYQHTELQKLFAYFDTSKSDLELILSDMVMVKDYPIELIDLVRKSRTLVDFLNKYLEARLGYIENVITRVKNSIGTPQFKTVRKECFAFLKESNYTVASLDKQIERILSMPLFIERGFMDSKPTMLEGKSYQQHKEDFADWFVHYKENSNYQNFYDTEVYEIITEDKREQAKVTKKIKQQQKNDVFTLMMVNYMLEEVLKLPSNDRLSLNELYQTKEERIVNKQVAKDTQERNKNYIWNKVVDLQLCEGLVRIDKVKLKDIGNFRKYENDSRVKEFLTYQSDIVWSGYLSNEVDSNKLYVIERQLDNYESIRSKELLKEVQEIECIVYNQVANKESLKQSGNENFKQYVLQGLLPRGTDVREMLILSTDVKFKKEEIMQLGQVREVEQDLYSLIYIRNKFAHNQLPIKEFFDFCENNYRPISDNEYYAEYYMEIFRSIKEKYAS

SEQ ID NO: 235 - protein, 1157 aa, Myroides odoratimimus; identical to SEQ ID NO: 234

SEQ ID NO: 236 - protein, 1157 aa, Myroides odoratimimus
MKDILTTDTTEKQNRFYSHKIADKYFFGGYFNLASNNIYEVFEEVNKRNTFGKLAKRDNGNLKNYIIHVFKDELSISDFEKRVAIFASYFPILETVDKKSIKERNRTIDLTLSQRIRQFREMLISLVTAVDQLRNFYTHYHHSEIVIENKVLDFLNSSLVSTALHVKDKYLKTDKTKEFLKETIAAELDILIEAYKKKQIEKKNTRFKANKREDILNAIYNEAFWSFINDKDKDKETVVAKGADAYFEKNHHKSNDPDFALNISEKGIVYLLSFFLTNKEMDSLKANLTGFKGKVDRESGNSIKYMATQRIYSFHTYRGLKQKIRTSEEGVKETLLMQMIDELSKVPNVVYQHLSTTQQNSFIEDWNEYYKDYEDDVETDDLSRVIHPVIRKRYEDRFNYFAIRFLDEFFDFPTLRFQVHLGDYVHDRRTKQLGKVESDRIIKEKVTVFARLKDINSAKANYFHSLEEQDKEELDNKWTLFPNPSYDFPKEHTLQHQGEQKNAGKIGIYVKLRDTQYKEKAALEEARKSLNPKERSATKASKYDIITQIIEANDNVKSEKPLVFTGQPIAYLSMNDIHSMLFSLLTDNAELKKTPEEVEAKLIDQIGKQINEILSKDTDTKILKKYKDNDLKETDTDKITRDLARDKEEIEKLILEQKQRADDYNYTSSTKFNIDKSRKRKHLLFNAEKGKIGVWLANDIKRFMTEEFKSKWKGYQHTELQKLFAYYDTSKSDLDLILSDMVMVKDYPIELIALVKKSRTLVDFLNKYLEARLGYMENVITRVKNSIGTPQFKTVRKECFTFLKKSNYTVVSLDKQVERILSMPLFIERGFMDDKPTMLEGKSYQQHKEKFADWFVHYKENSNYQNFYDTEVYEITTEDKREKAKVTKKIKQQQKNDVFTLMMVNYMLEEVLKLSSNDRLSLNELYQTKEERIVNKQVAKDTQERNKNYIWNKVVDLQLCEGLVRIDKVKLKDIGNFRKYENDSRVKEFLTYQSDIVWSAYLSNEVDSNKLYVIERQLDNYESIRSKELLKEVQEIECSVYNQVANKESLKQSGNENFKQYVLQGLVPIGMDVREMLILSTDVKFIKEEIIQLGQAGEVEQDLYSLIYIRNKFAHNQLPIKEFFDFCENNYRSISDNEYYAEYYMEIFRSIKEKYTS

SEQ ID NO: 237 - protein, 1157 aa, Myroides odoratimimus; identical to SEQ ID NO: 236

SEQ ID NO: 238 - protein, 1159 aa, Myroides odoratimimus
MKDILTTDTTEKQNRFYSHKIADKYFFGGYFNLASNNIYEVFEEVNKRNTFGKLAKRDNGNLKNYIIHVFKDELSISDFEKRVAIFASYFPILETVDKKSIKERNRTIDLTLSQRIRQFREMLISLVTAVDQLRNFYTHYHHSDIVIENKVLDFLNSSFVSTALHVKDKYLKTDKTKEFLKETIAAELDILIEAYKKKQIEKKNTRFKANKREDILNAIYNEAFWSFINDKDKDKDKETVVAKGADAYFEKNHHKSNDPDFALNISEKGIVYLLSFFLTNKEMDSLKANLTGFKGKVDRESGNSIKYMATQRIYSFHTYRGLKQKIRTSEEGVKETLLMQMIDELSKVPNVVYQHLSTTQQNSFIEDWNEYYKDYEDDVETDDLSRVTHPVIRKRYEDRFNYFAIRFLDEFFDFPTLRFQVHLGDYVHDRRTKQLGKVESDRIIKEKVTVFARLKDINSAKASYFHSLEEQDKEELDNKWTLFPNPSYDFPKEHTLQHQGEQKNAGKIGIYVKLRDTQYKEKAALEEARKSLNPKERSATKASKYDIITQIIEANDNVKSEKPLVFTGQPIAYLSMNDIHSMLFSLLTDNAELKKTPEEVEAKLIDQIGKQINEILSKDTDTKILKKYKDNDLKETDTDKITRDLARDKEEIEKLILEQKQRADDYNYTSSTKFNIDKSRKRKHLLFNAEKGKIGVWLANDIKRFMFKESKSKWKGYQHIELQKLFAYFDTSKSDLELILSNMVMVKDYPIELIDLVKKSRTLVDFLNKYLEARLEYIENVITRVKNSIGTPQFKTVRKECFTFLKKSNYTVVSLDKQVERILSMPLFIERGFMDDKPTMLEGKSYKQHKEKFADWFVHYKENSNYQNFYDTEVYEITTEDKREKAKVTKKIKQQQKNDVFTLMMVNYMLEEVLKLSSNDRLSLNELYQTKEERIVNKQVAKDTQERNKNYIWNKVVDLQLCDGLVHIDNVKLKDIGNFRKYENDSRVKEFLTYQSDIVWSAYLSNEVDSNKLYVIERQLDNYESIRSKELLKEVQEIECSVYNQVANKESLKQSGNENFKQYVLQGLLPIGMDVREMLILSTDVKFKKEEIIQLGQAGEVEQDLYSLIYIRNKFAHNQLPIKEFFDFCENNYRSISDNEYYAEYYMEIFRSIKEKYAN

SEQ ID NO: 239 - protein, 1224 aa, Bergeyella zoohelcum; identical to SEQ ID NO: 44

SEQ ID NO: 240 - protein, 1218 aa, Capnocytophaga cynodegmi
MENKTSLGNNIYYNPFKPQDKSYFAGYLNAAMENIDSVFRELGKRLKGKEYTSENFFDAIFKENISLVEYERYVKLLSDYFPMARLLDKKEVPIKERKENFKKNFRGIIKAVRDLRNFYTHKEHGEVEITDEIFGVLDEMLKSTVLTVKKKKIKTDKTKEILKKSIEKQLDILCQKKLEYLKDTARKIEEKRRNQRERGEKKLVPRFEYSDRRDDLIAAIYNDAFDVYIDKKKDSLKESSKTKYNTESYPQQEEGDLKIPISKNGVVFLLSLFLSKQEVHAFKSKIAGFKATVIDEATVSHRKNSICFMATHEIFSHLAYKKLKRKVRTAEINYSEAENAEQLSIYAKETLMMQMLDELSKVPDVVYQNLSEDVQKTFIEDWNEYLKENNGDVGTMEEEQVIHPVIRKRYEDKFNYFAIRFLDEFAQFPTLRFQVHLGNYLHDSRPKEHLISDRRIKEKITVFGRLSELEHKKALFIKNTETNEDRKHYWEVFPNPNYDFPKENISVNDKDFPIAGSILDREKQPTAGKIGIKVNLLNQKYISEVDKAVKAHQLKQRNNKPSIQNIIEEIVPINGSNPKEIIVFGGQPTAYLSMNDIHSILYEFFDKWEKKKEKLEKKGEKELRKEIGKELEEKIVGKIQTQIQQIIDKDINAKILKPYQDDDSTAIDKEKLIKDLKQEQKILQKLKNEQTAREKEYQECIAYQEESRKIKRSDKSRQKYLRNQLKRKYPEVPTRKEILYYQEKGKVAVWLANDIKRFMPTDFKNEWKGEQHSLLQKSLAYYEQCKEELKNLLPQQKVFKHLPFELGGHFQQKYLYQFYTRYLDKRLEHISGLVQQAENFKNENKVFKKVENECFKFLKKQNYTHKGLDAQAQSVLGYPIFLERGFMDEKPTIIKGKTFKGNESLFTDWFRYYKEYQNFQTFYDTENYPLVELEKKQADRKRETKIYQQKKNDVFTLLMAKHIFKSVFKQDSIDRFSLEDLYQSREERLENQEKAKQTGERNTNYIWNKTVDLNLCDGKVTVENVKLKNVGNFIKYEYDQRVQTFLKYEENIKWQAFLIKESKEEENYPYIVEREIEQYEKVRREELLKEVHLIEEYILEKVKDKEILKKGDNQNFKYYILNGLLKQLKNEDVESYKVFNLNTKPEDVNINQLKQEATDLEQKAFVLTYIRNKFAHNQLPKKEFWDYCQEKYGKIEKEKTYAEYFAEVFKREKEALMK

SEQ ID NO: 241 - protein, 1224 aa, Bergeyella zoohelcum; identical to SEQ ID NO: 44

SEQ ID NO: 242 - protein, 1155 aa, Unknown
  Flavobacterium sp
MDNNITVEKTELGLGITYNHDKVEDKHYFGGFFNLAQNNIDLVAQEFKKRLLIQGKDSINIFANYFSDQCSITNLERGIKILAEYFPVVSYIDLDEKNKSKSIREHLILLLETINNLRNYYTHYYHKKIIIDGSLFPLLDTILLKVVLEIKKKKLKEDKTKQLLKKGLEKEMTILFNLMKAEQKEKKIKGWNIDENIKGAVLNRAFSHLLYNDELSDYRKSKYNTEDETLKDTLTESGILFLLSFFLNKKEQEQLKANIKGYKGKIASIPDEEITLKNNSLRNMATHWTYSHLTYKGLKHRIKTDHEKETLLVNMVDYLSKVPHEIYQNLSEQNKSLFLEDINEYMRDNEENHDSSEASRVIHPVIRKRYENKFAYFAIRFLDEFAEFPTLRFMVNVGNYIHDNRKKDIGGTSLITNRTIKQQINVFGNLTEIHKKKNDYFEKEENKEKTLEWELFPNPSYHFQKENIPIFIDLEKSKETNDLAKEYAKEKKKIFGSSRKKQQNTAKKNRETIINLVFDKYKTSDRKTVTFEQPTALLSFNELNSFLYAFLVENKTGKELEKIIIEKIANQYQILKNCSSTVDKTNDNIPKSIKKIVNTTTDSFYFEGKKIDIEKLEKDITIEIEKTNEKLETIKENEESAQNYKRNERNTQKRKLYRKYVFFTNEIGIEATWITNDILRFLDNKENWKGYQHSELQKFISQYDNYKKEALGLLESEWNLESDAFFGQNLKRMFQSNSTFETFYKKYLDNRKNTLETYLSAIENLKTMTDVRPKVLKKKWTELFRFFDKKIYLLSTIETKINELITKPINLSRGIFEEKPTFINGKNPNKENNQHLFANWFIYAKKQTILQDFYNLPLEQPKAITNLKKHKYKLERSINNLKIEDIYIKQMVDFLYQKLFEQSFIGSLQDLYTSKEKREIEKGKAKNEQTPDESFIWKKQVEINTHNGRIIAKTKIKDIGKFKNLLTDNKIAHLISYDDRIWDFSLNNDGDITKKLYSINTELESYETIRREKLLKQIQQFEQFLLEQETEYSAERKHPEKFEKDCNPNFKKYIIEGVLNKIIPNHEIEEIEILKSKEDVFKINFSDILILNNDNIKKGYLLIMIRNKFAHNQLIDKNLFNFSLQLYSKNENENFSEYLNKVCQNIIQEFKEKLK

SEQ ID NO: 243 - protein, 1145 aa, Psychroflexus torquis
MESIIGLGLSFNPYKTADKHYFGSFLNLVENNLNAVFAEFKERISYKAKDENISSLIEKHFIDNMSIVDYEKKISILNGYLPIIDFLDDELENNLNTRVKNFKKNFIILAEAIEKLRDYYTHFYHDPITFEDNKEPLLELLDEVLLKTILDVKKKYLKTDKTKEILKDSLREEMDLLVIRKTDELREKKKTNPKIQHTDSSQIKNSIFNDAFQGLLYEDKGNNKKTQVSHRAKTRLNPKDIHKQEERDFEIPLSTSGLVFLMSLFLSKKEIEDFKSNIKGFKGKVVKDENHNSLKYMATHRVYSILAFKGLKYRIKTDTFSKETLMMQMIDELSKVPDCVYQNLSETKQKDFIEDWNEYFKDNEENTENLENSRVVHPVIRKRYEDKFNYFAIRFLDEFANFKTLKFQVFMGYYIHDQRTKTIGTTNITTERTVKEKINVFGKLSKMDNLKKHFFSQLSDDENTDWEFFPNPSYNFLTQADNSPANNIPIYLELKNQQIIKEKDAIKAEVNQTQNRNPNKPSKRDLLNKILKTYEDFHQGDPTAILSLNEIPALLHLFLVKPNNKTGQQIENIIRIKIEKQFKAINHPSKNNKGIPKSLFADTNVRVNAIKLKKDLEAELDMLNKKHIAFKENQKASSNYDKLLKEHQFTPKNKRPELRKYVFYKSEKGEEATWLANDIKRFMPKDFKTKWKGCQHSELQRKLAFYDRHTKQDIKELLSGCEFDHSLLDINAYFQKDNFEDFFSKYLENRIETLEGVLKKLHDFKNEPTPLKGVFKNCFKFLKRQNYVTESPEIIKKRILAKPTFLPRGVFDERPTMKKGKNPLKDKNEFAEWFVEYLENKDYQKFYNAEEYRMRDADFKKNAVIKKQKLKDFYTLQMVNYLLKEVFGKDEMNLQLSELFQTRQERLKLQGIAKKQMNKETGDSSENTRNQTYIWNKDVPVSFFNGKVTIDKVKLKNIGKYKRYERDERVKTFIGYEVDEKWMMYLPHNWKDRYSVKPINVIDLQIQEYEEIRSHELLKEIQNLEQYIYDHTTDKNILLQDGNPNFKMYVLNGLLIGIKQVNIPDFIVLKQNTNFDKIDFTGIASCSELEKKTIILIAIRNKFAHNQLPNKMIYDLANEFLKIEKNETYANYYLKVLKKMISDLA

SEQ ID NO: 244 - protein, 1179 aa, Flavobacterium columnare
MSSKNESYNKQKTFNHYKQEDKYFFGGFLNNADDNLRQVGKEFKTRINFNHNNNELASVFKDYFNKEKSVAKREHALNLLSNYFPVLERIQKHTNHNFEQTREIFELLLDTIKKLRDYYTHHYHKPITINPKIYDFLDDTLLDVLITIKKKKVKNDTSRELLKEKLRPELTQLKNQKREELIKKGKKLLEENLENAVFNHCLRPFLEENKTDDKQNKTVSLRKYRKSKPNEETSITLTQSGLVFLMSFFLHRKEFQVFTSGLEGFKAKVNTIKEEEISLNKNNIVYMITHWSYSYYNFKGLKHRIKTDQGVSTLEQNNTTHSLTNTNTKEALLTQIVDYLSKVPNEIYETLSEKQQKEFEEDINEYMRENPENEDSTFSSIVSHKVIRKRYENKFNYFAMRFLDEYAELPTLRFMVNFGDYIKDRQKKILESIQFDSERIIKKEIHLFEKLSLVTEYKKNVYLKETSNIDLSRFPLFPNPSYVMANNNIPFYIDSRSNNLDEYLNQKKKAQSQNKKRNLTFEKYNKEQSKDAIIAMLQKEIGVKDLQQRSTIGLLSCNELPSMLYEVIVKDIKGAELENKIAQKIREQYQSIRDFTLDSPQKDNIPTTLIKTINTDSSVTFENQPIDIPRLKNAIQKELTLTQEKLLNVKEHEIEVDNYNRNKNTYKFKNQPKNKVDDKKLQRKYVFYRNEIRQEANWLASDLIHFMKNKSLWKGYMHNELQSFLAFFEDKKNDCIALLETVFNLKEDCILTKGLKNLFLKHGNFIDFYKEYLKLKEDFLNTESTFLENGLIGLPPKILKKELSKRFKYIFIVFQKRQFIIKELEEKKNNLYADAINLSRGIFDEKPTMIPFKKPNPDEFASWFVASYQYNNYQSFYELTPDIVERDKKKKYKNLRAINKVKIQDYYLKLMVDTLYQDLFNQPLDKSLSDFYVSKAEREKIKADAKAYQKRNDSSLWNKVIHLSLQNNRITANPKLKDIGKYKRALQDEKIATLLTYDDRTWTYALQKPEKENENDYKELHYTALNMELQEYEKVRSKELLKQVQELEKQILEEYTDFLSTQIHPADFEREGNPNFKKYLAHSILENEDDLDKLPEKVEAMRELDETITNPIIKKAIVLIIIRNKMAHNQYPPKFIYDLANRFVPKKEEEYFATYFNRVFETITKELWENKEKKDKTQV

SEQ ID NO: 245 - protein, 1213 aa, Flavobacterium columnare
MSSKNESYNKQKTFNHYKQEDKYFFGGFLNNADDNLRQVGKEFKTRINFNHNNNELASVFKDYFNKEKSVAKREHALNLLSNYFPVLERIQKHTNHNFEQTREIFELLLDTIKKLRDYYTHHYHKPITINPKVYDFLDDTLLDVLITIKKKKVKNDTSRELLKEKFRPELTQLKNQKREELIKKGKKLLEENLENAVFNHCLRPFLEENKTDDKQNKTVSLRKYRKSKPNEETSITLTQSGLVFLISFFLHRKEFQVFTSGLEGFKAKVNTIKEEEISLNKNNIVYMITHWSYSYYNFKGLKHRIKTDQGVSTLEQNNTTHSLTNTNTKEALLTQIVDYLSKVPNEIYETLSEKQQKEFEEDINEYMRENPENEDSTFSSIVSHKVIRKRYENKFNYFAMRFLDEYAELPTLRFMVNFGDYIKDRQKKILESIQFDSERIIKKEIHLFEKLGLVTEYKKNVYLKETSNIDLSRFPLFPSPSYVMANNNIPFYIDSRSNNLDEYLNQKKKAQSQNRKRNLTFEKYNKEQSKDAIIAMLQKEIGVKDLQQRSTIGLLSCNELPSMLYEVIVKDIKGAELENKIAQKIREQYQSIRDFTLDSPQKDNIPTTLTKTISTDTSVTFENQPIDIPRLKNALQKELTLTQEKLLNVKQHEIEVDNYNRNKNTYKFKNQPKDKVDDNKLQRKYVFYRNEIGQEANWLASDLIHFMKNKSLWKGYMHNELQSFLAFFEDKKNDCIALLETVFNLKEDCILTKDLKNLFLKHGNFIDFYKEYLKLKEDFLNTESTFLENGFIGLPPKILKKELSKRLNYIFIVFQKRQFIIKELEEKKNNLYADAINLSRGIFDEKPTMIPFKKPNPDEFASWFVASYQYNNYQSFYELTPDKIENDKKKKYKNLRAINKVKIQDYYLKLMVDTLYQDLFNQPLDKSLSDFYVSKTDREKIKADAKAYQKRNDSFLWNKVIHLSLQNNRITANPKLKDIGKYKRALQDEKIATLLTYDDRTWTYALQKPEKENENDYKELHYTALNMELQEYEKVRSKKLLKQVQELEKQILDKFYDFSNNATHPEDLEIEDKKGKRHPNFKLYITKALLKNESEIINLENIDIEILIKYYDYNTEKLKEKIKNMDEDEKAKIVNTKENYNKITNVLIKKALVLIIIRNKMAHNQYPPKFIYDLATRFVPKKEEEYFACYFNRVFETITTELWENKKKAKEIV

SEQ ID NO: 246 - protein, 1213 aa, Flavobacterium columnare
MSSKNESYNKQKTFNHYKQEDKYFFGGFLNNADDNLRQVGKEFKTRINFNHNNNELASVFKDYFNKEKSVAKREHALNLLSNYFPVLERIQKHTNHNFEQTREIFELLLDTIKKLRDYYTHHYHKPITINPKIYDFLDDTLLDVLITIKKKKVKNDTSRELLKEKLRPELTQLKNQKREELIKKGKKLLEENLENAVFNHCLRPFLEENKTDDKQNKTVSLRKYRKSKPNEETSITLTQSGLVFLMSFFLHRKEFQVFTSGLEGFKAKVNTIKEEKISLNKNNIVYMITHWSYSYYNFKGLKHRIKTDQGVSTLEQNNTTHSLTNTNTKEALLTQIVDYLSKVPNEIYETLSEKQQKEFEEDINEYMRENPENEDSTFSSIVSHKVIRKRYENKFNYFAMRFLDEYAELPTLRFMVNFGDYIKDRQKKILESIQFDSERIIKKEIHLFEKLGLVTEYKKNVYLKETSNIDLSRFPLFPSPSYVMANNNIPFYIDSRSNNLDEYLNQKKKAQSQNRKRNLTFEKYNKEQSKDAIIAMLQKEIGVKDLQQRSTIGLLSCNELPSMLYEVIVKDIKGAELENKIAQKIREQYQSIRDFTLNSPQKDNIPTTLIKTISTDTSVTFENQPIDIPRLKNAIQKELALTQEKLLNVKQHEIEVNNYNRNKNTYKFKNQPKDKVDDNKLQRKYVFYRNEIGQEANWLASDLIHFMKNKSLWKGYMHNELQSFLAFFEDKKNDCIALLETVFNLKEDCILTKDLKNLFLKHGNFIDFYKEYLKLKEDFLNTESTFLENGFIGLPPKILKKELSKRLNYIFIVFQKRQFIIKELEEKKNNLYADAINLSRGIFDEKPTMIPFKKPNPDEFASWFVASYQYNNYQSFYELTPDKIENDKKKKYKNLRAINKVKIQDYYLKLMVDTLYQDLFNQPLDKSLSDFYVSKTDREKIKADAKAYQKRNDSFLWNKVIHLSLQNNRITANPKLKDIGKYKRALQDEKIATLLTYDDRTWTYALQKPEKENENDYKELHYTALNMELQEYEKVRSKKLLKQVQELEKQILDKFYDFSNNATHPEDLEIEDKKGKRHPNFKLYITKALLKNESEIINLENIDIEILIKYYDYNTEKLKEKIKNMDEDEKAKIVNTKENYNKITNVLIKKALVLIIIRNKMAHNQYPPKFIYDLATRFVPKKEEEYFACYFNRVFETITTELWENKKKAKEIV

SEQ ID NO: 247 - protein, 1214 aa, Flavobacterium columnare
MSSKNESYNKQKTFNHYKQEDKYFFGGFLNNADDNLRQVGKEFKTRINFNHNNNELASVFKDYFNKEKSVAKREHALNLLSNYFPVLERIQKHTNHNFEQTREIFELLLDTIKKLRDYYTHHYHKPITINPKIYDFLDDTLLDVLITIKKKKVKNDTSRELLKEKLRPELTQLKNQKREELIKKGKKLLEENLENAVFNHCLIPFLEENKTDDKQNKTVSLRKYRKSKPNEETSITLTQSGLVFLMSFFLHRKEFQVFTSGLERFKAKVNTIKEEEISLNKNNIVYMITHWSYSYYNFKGLKHRIKTDQGVSTLEQNNTTHSLTNTNTKEALLTQIVDYLSKVPNEIYETLSEKQQKEFEEDINEYMRENPENEDSTFSSIVSHKVIRKRYENKFNYFAMRFLDEYAELPTLRFMVNFGDYIKDRQKKILESIQFDSERIIKKEIHLFEKLSLVTEYKKNVYLKETSNIDLSRFPLFPNPSYVMANNNIPFYIDSRSNNLDEYLNQKKKAQSQNKKRNLTFEKYNKEQSKDAIIAMLQKEIGVKDLQQRSTIGLLSCNELPSMLYEVIVKDIKGAELENKIAQKIREQYQSIRDFTLDSPQKDNIPTTLIKTINTDSSVTFENQPIDIPRLKNALQKELTLTQEKLLNVKEHEIEVDNYNRNKNTYKFKNQPKNKVDDKKLQRKYVFYRNEIRQEANWLASDLIHFMKNKSLWKGYMHNELQSFLAFFEDKKNDCIALLETVFNLKEDCILTKGLKNLFLKHGNFIDFYKEYLKLKEDFLSTESTFLENGFIGLPPKILKKELSKRLKYIFIVFQKRQFIIKELEEKKNNLYADAINLSRGIFDEKPTMIPFKKPNPDEFASWFVASYQYNNYQSFYELTPDIVERDKKKKYKNLRAINKVKIQDYYLKLMVDTLYQDLFNQPLDKSLSDFYVSKAEREKIKADAKAYQKLNDSSLWNKVIHLSLQNNRITANPKLKDIGKYKRALQDEKIATLLTYDARTWTYALQKPEKENENDYKELHYTALNMELQEYEKVRSKELLKQVQELEKKILDKFYDFSNNASHPEDLEIEDKKGKRHPNFKLYITKALLKNESEIINLENIDIEILLKYYDYNTEELKEKIKNMDEDEKAKIINTKENYNKITNVLIKKALVLIIIRNKMAHNQYPPKFIYDLANRFVPKKEEEYFATYFNRVFETITKELWENKEKKDKTQV

SEQ ID NO: 248 - protein, 1145 aa, Unknown
  Chryseobacterium sp.
METQTIGHGIAYDHSKIQDKHFFGGFLNLAENNIKAVLKAFSEKFNVGNVDVKQFADVSLKDNLPDNDFQKRVSFLKMYFPVVDFINIPNNRAKFRSDLTTLFKSVDQLRNFYTHYYHKPLDFDASLFILLDDIFARTAKEVRDQKMKDDKTRQLLSKSLSEELQKGYELQLERLKELNRLGKKVNIHDQLGIKNGVLNNAFNHLIYKDGESFKTKLTYSSALTSFESAENGIEISQSGLLFLLSMFLKRKEIEDLKNRNKGFKAKVVIDEDGKVNGLKFMATHWVFSYLCFKGLKSKLSTEFHEETLLIQIIDELSKVPDELYCAFDKETRDKFIEDINEYVKEGHQDFSLEDAKVIHPVIRKRYENKFNYFAIRFLDEFVKFPSLRFQVHVGNYVHDRRIKNIDGTTFETERVVKDRIKVFGRLSEISSYKAQYLSSVSDKHDETGWEIFPNPSYVFINNNIPIHISVDTSFKKEIADFKKLRRAQVPDELKIRGAEKKRKFEITQMIGSKSVLNQEEPIALLSLNEIPALLYEILINGKEPAEIERIIKDKLNERQDVIKNYNPENWLPASQISRRLRSNKGERIINTDKLLQLVTKELLVTEQKLKIISDNREALKQKKEGKYIRKFIFTNSELGREAIWLADDIKRFMPADVRKEWKGYQHSQLQQSLAFYNSRPKEALAILESSWNLKDEKIIWNEWILKSFTQNKFFDAFYNEYLKGRKKYFAFLSEHIVQYTSNAKNLQKFIKQQMPKDLFEKRHYIIEDLQTEKNKILSKPFIFPRGIFDKKPTFIKGVKVEDSPESFANWYQYGYQKDHQFQKFYDWKRDYSDVFLEHLGKPFINNGDRRTLGMEELKERIIIKQDLKIKKIKIQDLFLRLIAENLFQKVFKYSAKLPLSDFYLTQEERMEKENMAALQNVREEGDKSPNIIKDNFIWSKMIPYKKGQIIENAVKLKDIGKLNVLSLDDKVQTLLSYDDAKPWSKIALENEFSIGENSYEVIRREKLFKEIQQFESEILFRSGWDGINHPAQLEDNRNPKFKMYIVNGILRKSAGLYSQGEDIWFEYNADFNNLDADVLETKSELVQLAFLVTAIRNKFAHNQLPAKEFYFYIRAKYGFADEPSVALVYLNFTKYAINEFKKVMI

SEQ ID NO: 249 - protein, 1095 aa, Riemerella anatipestifer
MEKPLLPNVYTLKHKFFWGAFLNIARHNAFITICHINEQLGLKTPSNDDKIVDVVCETWNNILNNDHDLLKKSQLTELILKHFPFLTAMCYHPPKKEGKKKGHQKEQQKEKESEAQSQAEALNPSKLIEALEILVNQLHSLRNYYSHYKHKKPDAEKDIFKHLYKAFDASLRMVKEDYKAHFTVNLTRDFAHLNRKGKNKQDNPDFNRYRFEKDGFFTESGLLFFTNLFLDKRDAYWMLKKVSGFKASHKQREKMTTEVFCRSRILLPKLRLESRYDHNQMLLDMLSELSRCPKLLYEKLSEENKKHFQVEADGFLDEIEEEQNPFKDTLIRHQDRFPYFALRYLDLNESFKSIRFQVDLGTYHYCIYDKKIGDEQEKRHLTRTLLSFGRLQDFTEINRPQEWKALTKDLDYKETSNQPFISKTTPHYHITDNKIGFRLGTSKELYPSLEIKDGANRIAKYPYNSGFVAHAFISVHELLPLMFYQHLTGKSEDLLKETVRHIQRIYKDFEEERINTIEDLEKANQGRLPLGAFPKQMLGLLQNKQPDLSEKAKIKIEKLIAETKLLSHRLNTKLKSSPKLGKRREKLIKTGVLADWLVKDFMRFQPVAYDAQNQPIKSSKANSTEFWFIRRALALYGGEKNRLEGYFKQTNLIGNTNPHPFLNKFNWKACRNLVDFYQQYLEQREKFLEAIKNQPWEPYQYCLLLKIPKENRKNLVKGWEQGGISLPRGLFTEAIRETLSEDLMLSKPIRKEIKKHGRVGFISRAITLYFKEKYQDKHQSFYNLSYKLEAKAPLLKREEHYEYWQQNKPQSPTESQRLELHTSDRWKDYLLYKRWQHLEKKLRLYRNQDVMLWLMTLELTKNHFKELNLNYHQLKLENLAVNVQEADAKLNPLNQTLPMVLPVKVYPATAFGEVQYHKTPIRTVYIREEHTKALKMGNFKALVKDRRLNGLFSFIKEENDTQKHPISQLRLRRELEIYQSLRVDAFKETLSLEEKLLNKHTSLSSLENEFRALLEEWKKEYAASSMVTDEHIAFIASVRNAFCHNQYPFYKEALHAPIPLFTVAQPTTEEKDGLGIAEALLKVLREYCEIVKSQI

SEQ ID NO: 250 - protein, 948 aa, Riemerella anatipestifer
MFFSFHNAQRVIFKHLYKAFDASLRMVKEDYKAHFTVNLTRDFAHLNRKGKNKQDNPDFNRYRFEKDGFFTESGLLFFTNLFLDKRDAYWMLKKVSGFKASHKQREKMTTEVFCRSRILLPKLRLESRYDHNQMLLDMLSELSRCPKLLYEKLSEENKKHFQVEADGFLDEIEEEQNPFKDTLIRHQDRFPYFALRYLDLNESFKSIRFQVDLGTYHYCIYDKKIGDEQEKRHLTRTLLSFGRLQDFTEINRPQEWKALTKDLDYKETSNQPFISKTTPHYHITDNKIGFRLGTSKELYPSLEIKDGANRIAKYPYNSGFVAHAFISVHELLPLMFYQHLTGKSEDLLKETVRHIQRIYKDFEEERINTIEDLEKANQGRLPLGAFPKQMLGLLQNKQPDLSEKAKIKIEKLIAETKLLSHRLNTKLKSSPKLGKRREKLIKTGVLADWLVKDFMRFQPVAYDAQNQPIKSSKANSTEFWFIRRALALYGGEKNRLEGYFKQTNLIGNTNPHPFLNKFNWKACRNLVDFYQQYLEQREKFLEAIKNQPWEPYQYCLLLKIPKENRKNLVKGWEQGGISLPRGLFTEAIRETLSEDLMLSKPIRKEIKKHGRVGFISRAITLYFKEKYQDKHQSFYNLSYKLEAKAPLLKREEHYEYWQQNKPQSPTESQRLELHTSDRWKDYLLYKRWQHLEKKLRLYRNQDVMLWLMTLELTKNHFKELNLNYHQLKLENLAVNVQEADAKLNPLNQTLPMVLPVKVYPATAFGEVQYHKTPIRTVYIREEHTKALKMGNFKALVKDRRLNGLFSFIKEENDTQKHPISQLRLRRELEIYQSLRVDAFKETLSLEEKLLNKHTSLSSLENEFRALLEEWKKEYAASSMVTDEHIAFIASVRNAFCHNQYPFYKEALHAPIPLFTVAQPTTEEKDGLGIAEALLKVLREYCEIVKSQI

SEQ ID NO: 251 - protein, 950 aa, Riemerella anatipestifer
MFFSFHNAQRVIFKHLYKAFDASLRMVKEDYKAHFTVNLTRDFAHLNRKGKNKQDNPDFNRYRFEKDGFFTESGLLFFTNLFLDKRDAYWMLKKVSGFKASHKQSEKMTTEVFCRSRILLPKLRLESRYDHNQMLLDMLSELSRCPKLLYEKLSEKDKKCFQVEADGFLDEIEEEQNPFKDTLIRHQDRFPYFALRYLDLNESFKSIRFQVDLGTYHYCIYDKKIGYEQEKRHLTRTLLNFGRLQDFTEINRPQEWKALTKDLDYNETSNQPFISKTTPHYHITDNKIGFRLRTSKELYPSLEVKDGANRIAKYPYNSDFVAHAFISISVHELLPLMFYQHLTGKSEDLLKETVRHIQRIYKDFEEERINTIEDLEKANQGRLPLGAFPKQMLGLLQNKQPDLSEKAKIKIEKLIAETKLLSHRLNTKLKSSPKLGKRREKLIKTGVLADWLVKDFMRFQPVVYDAQNQPIKSSKANSTESRLIRRALALYGGEKNRLEGYFKQTNLIGNTNPHPFLNKFNWKACRNLVDFYQQYLEQREKFLEAIKHQPWEPYQYCLLLKVPKENRKNLVKGWEQGGISLPRGLFTEAIRETLSKDLTLSKPIRKEIKKHGRVGFISRAITLYFKEKYQDKHQSFYNLSYKLEAKAPLLKKEEHYEYWQQNKPQSPTESQRLELHTSDRWKDYLLYKRWQHLEKKLRLYRNQDIMLWLMTLELTKNHFKELNLNYHQLKLENLAVNVQEADAKLNPLNQTLPMVLPVKVYPTTAFGEVQYHETPIRTVYIREEQTKALKMGNFKALVKDRHLNGLFSFIKEENDTQKHPISQLRLRRELEIYQSLRVDAFKETLSLEEKLLNKHASLSSLENEFRTLLEEWKKKYAASSMVTDKHIAFIASVRNAFCHNQYPFYKETLHAPILLFTVAQPTTEEKDGLGIAEALLRVLREYCEIVKSQI

SEQ ID NO: 252 - protein, 1095 aa, Riemerella anatipestifer
MEKPLPPNVYTLKHKFFWGAFLNIARHNAFITICHINEQLGLTTPPNDDKIADVVCGTWNNILNNDHDLLKKSQLTELILKHFPFLAAMCYHPPKKEGKKKGSQKEQQKEKENEAQSQAEALNPSELIKVLKTLVKQLRTLRNYYSHHSHKKPDAEKDIFKHLYKAFDASLRMVKEDYKAHFTVNLTQDFAHLNRKGKNKQDNPDFDRYRFEKDGFFTESGLLFFTNLFLDKRDAYWMLKKVSGFKASHKQSEKMTTEVFCRSRILLPKLRLESRYDHNQMLLDMLSELSRYPKLLYEKLSEEDKKRFQVEADGFLDEIEEEQNPFKDTLIRHQDRFPYFALRYLDLNESFKSIRFQVDLGTYHYCIYDKKIGDEQEKRHLTRTLLSFGRLQDFTEINRPQEWKALTKDLDYKETSKQPFISKTTPHYHITDNKIGFRLGTSKELYPSLEVKDGANRIAQYPYNSDFVAHAFISVHELLPLMFYQHLTGKSEDLLKETVRHIQRIYKDFEEERINTIEDLEKANQGRLPLGAFPKQMLGLLQNKQPDLSEKAKIKIEKLIAETKLLSHRLNTKLKSSPKLGKRREKLIKTGVLADWLVKDFMRFQPVAYDAQNQPIESSKANSTEFQLIQRALALYGGEKNRLEGYFKQTNLIGNTNPHPFLNKFNWKACRNLVDFYQQYLEQREKFLEAIKNQPWEPYQYCLLLKIPKENRKNLVKGWEQGGISLPRGLFTEAIRETLSKDLTLSKPIRKEIKKHGRVGFISRAITLYFREKYQDDHQSFYDLPYKLEAKASPLPKKEHYEYWQQNKPQSPTELQRLELHTSDRWKDYLLYKRWQHLEKKLRLYRNQDVMLWLMTLELTKNHFKELNLNYHQLKLENLAVNVQEADAKLNPLNQTLPMVLPVKVYPATAFGEVQYQETPIRTVYIREEQTKALKMGNFKALVKDRRLNGLFSFIKEENDTQKHPISQLRLRRELEIYQSLRVDAFKETLNLEEKLLKKHTSLSSVENKFRILLEEWKKEYAASSMVTDEHIAFIASVRNAFCHNQYPFYEEALHAPIPLFTVAQQTTEEKDGLGIAEALLRVLREYCEIVKSQI

SEQ ID NO: 253 - protein, 1150 aa, Prevotella saccharolytica
MMEKENVQGSHIYYEPTDKCFWAAFYNLARHNAYLTIAHINSFVNSKKGINNDDKVLDIIDDWSKFDNDLLMGARLNKLILKHFPFLKAPLYQLAKRKTRKQQGKEQQDYEKKGDEDPEVIQEAIANAFKMANVRKTLHAFLKQLEDLRNHFSHYNYNSPAKKMEVKFDDGFCNKLYYVFDAALQMVKDDNRMNPEINMQTDFEHLVRLGRNRKIPNTFKYNFTNSDGTINNNGLLFFVSLFLEKRDAIWMQKKIKGFKGGTENYMRMTNEVFCRNRMVIPKLRLETDYDNHQLMFDMLNELVRCPLSLYKRLKQEDQDKFRVPIEFLDEDNEADNPYQENANSDENPTEETDPLKNTLVRHQHRFPYFVLRYFDLNEVFKQLRFQINLGCYHFSIYDKTIGERTEKRHLTRTLFGFDRLQNFSVKLQPEHWKNMVKHLDTEESSDKPYLSDAMPHYQIENEKIGIHFLKTDTEKKETVWPSLEVEEVSSNRNKYKSEKNLTADAFLSTHELLPMMFYYQLLSSEEKTRAAAGDKVQGVLQSYRKKIFDIYDDFANGTINSMQKLDERLAKDNLLRGNMPQQMLAILEHQEPDMEQKAKEKLDRLITETKKRIGKLEDQFKQKVRIGKRRADLPKVGSIADWLVNDMMRFQPAKRNADNTGVPDSKANSTEYRLLQEALAFYSAYKDRLEPYFRQVNLIGGTNPHPFLHRVDWKKCNHLLSFYHDYLEAKEQYLSHLSPADWQKHQHFLLLKVRKDIQNEKKDWKKSLVAGWKNGFNLPRGLFTESIKTWFSTDADKVQITDTKLFENRVGLIAKLIPLYYDKVYNDKPQPFYQYPFNINDRYKPEDTRKRFTAASSKLWNEKKMLYKNAQPDSSDKIEYPQYLDFLSWKKLERELRMLRNQDMMVWLMCKDLFAQCTVEGVEFADLKLSQLEVDVNVQDNLNVLNNVSSMILPLSVYPSDAQGNVLRNSKPLHTVYVQENNTKLLKQGNFKSLLKDRRLNGLFSFIAAEGEDLQQHPLTKNRLEYELSIYQTMRISVFEQTLQLEKAILTRNKTLCGNNFNNLLNSWSEHRTDKKTLQPDIDFLIAVRNAFSHNQYPMSTNTVMQGIEKFNIQTPKLEEKDGLGIASQLAKKTKDAASRLQNIINGGTN

SEQ ID NO: 254 - protein, 1127 aa, Prevotella buccae
MQKQDKLFVDRKKNAIFAFPKYITIMENKEKPEPIYYELTDKHFWAAFLNLARHNVYTTINHINRRLEIAELKDDGYMMGIKGSWNEQAKKLDKKVRLRDLIMKHFPFLEAAAYEMTNSKSPNNKEQREKEQSEALSLNNLKNVLFIFLEKLQVLRNYYSHYKYSEESPKPIFETSLLKNMYKVFDANVRLVKRDYMHHENIDMQRDFTHLNRKKQVGRTKNIIDSPNFHYHFADKEGNMTIAGLLFFVSLFLDKKDAIWMQKKLKGFKDGRNLREQMTNEVFCRSRISLPKLKLENVQTKDWMQLDMLNELVRCPKSLYERLREKDRESFKVPFDIFSDDYNAEEEPFKNTLVRHQDRFPYFVLRYFDLNEIFEQLRFQIDLGTYHFSIYNKRIGDEDEVRHLTHHLYGFARIQDFAPQNQPEEWRKLVKDLDHFETSQEPYISKTAPHYHLENEKIGIKFCSAHNNLFPSLQTDKTCNGRSKFNLGTQFTAEAFLSVHELLPMMFYYLLLTKDYSRKESADKVEGIIRKEISNIYAIYDAFANNEINSIADLTRRLQNTNILQGHLPKQMISILKGRQKDMGKEAERKIGEMIDDTQRRLDLLCKQTNQKIRIGKRNAGLLKSGKIADWLVNDMMRFQPVQKDQNNIPINNSKANSTEYRMLQRALALFGSENFRLKAYFNQMNLVGNDNPHPFLAETQWEHQTNILSFYRNYLEARKKYLKGLKPQNWKQYQHFLILKVQKTNRNTLVTGWKNSFNLPRGIFTQPIREWFEKHNNSKRIYDQILSFDRVGFVAKAIPLYFAEEYKDNVQPFYDYPFNIGNRLKPKKRQFLDKKERVELWQKNKELFKNYPSEKKKTDLAYLDFLSWKKFERELRLIKNQDIVTWLMFKELFNMATVEGLKIGEIHLRDIDTNTANEESNNILNRIMPMKLPVKTYETDNKGNILKERPLATFYIEETETKVLKQGNFKALVKDRRLNGLFSFAETTDLNLEEHPISKLSVDLELIKYQTTRISIFEMTLGLEKKLIDKYSTLPTDSFRNMLERWLQCKANRPELKNYVNSLIAVRNAFSHNQYPMYDATLFAEVKKFTLFPSVDTKKIELNIAPQLLEIVGKAIKEIEKSENKN

SEQ ID NO: 255 - protein, 1127 aa, Prevotella buccae; identical to SEQ ID NO: 254

SEQ ID NO: 256 - protein, 1127 aa, Prevotella buccae
MQKQDKLFVDRKKNAIFAFPKYITIMENQEKPEPIYYELTDKHFWAAFLNLARHNVYTTINHINRRLEIAELKDDGYMMDIKGSWNEQAKKLDKKVRLRDLIMKHFPFLEAAAYEITNSKSPNNKEQREKEQSEALSLNNLKNVLFIFLEKLQVLRNYYSHYKYSEESPKPIFETSLLKNMYKVFDANVRLVKRDYMHHENIDMQRDFTHLNRKKQVGRTKNIIDSPNFHYHFADKEGNMTIAGLLFFVSLFLDKKDAIWMQKKLKGFKDGRNLREQMTNEVFCRSRISLPKLKLENVQTKDWMQLDMLNELVRCPKSLYERLREKDRESFKVPFDIFSDDYDAEEEPFKNTLVRHQDRFPYFVLRYFDLNEIFEQLRFQIDLGTYHFSIYNKRIGDEDEVRHLTHHLYGFARIQDFAQQNQPEVWRKLVKDLDYFEASQEPYIPKTAPHYHLENEKIGIKFCSTHNNLFPSLKTEKTCNGRSKFNLGTQFTAEAFLSVHELLPMMFYYLLLTKDYSRKESADKVEGIIRKEISNIYAIYDAFANGEINSIADLTCRLQKTNILQGHLPKQMISILEGRQKDMEKEAERKIGEMIDDTQRRLDLLCKQTNQKIRIGKRNAGLLKSGKIADWLVNDMMRFQPVQKDQNNIPINNSKANSTEYRMLQRALALFGSENFRLKAYFNQMNLVGNDNPHPFLAETQWEHQTNILSFYRNYLEARKKYLKGLKPQNWKQYQHFLILKVQKTNRNTLVTGWKNSFNLPRGIFTQPIREWFEKHNNSKRIYDQILSFDRVGFVAKAIPLYFAEEYKDNVQPFYDYPFNIGNKLKPQKGQFLDKKERVELWQKNKELFKNYPSEKKKTDLAYLDFLSWKKFERELRLIKNQDIVTWLMFKELFNMATVEGLKIGEIHLRDIDTNTANEESNNILNRIMPMKLPVKTYETDNKGNILKERPLATFYIEETETKVLKQGNFKVLAKDRRLNGLLSFAETTDIDLEKNPITKLSVDHELIKYQTTRISIFEMTLGLEKKLINKYPTLPTDSFRNMLERWLQCKANRPELKNYVNSLIAVRNAFSHNQYPMYDATLFAEVKKFTLFPSVDTKKIELNIAPQLLEIVGKAIKEIEKSENKN

SEQ ID NO: 257 - protein, 1127 aa, Unknown
  Prevotella sp.
MQKQDKLFVDRKKNAIFAFPKYITIMENQEKPEPIYYELTDKHFWAAFLNLARHNVYTTINHINRRLEIAELKDDGYMMGIKGSWNEQAKKLDKKVRLRDLIMKHFPFLEAAAYEITNSKSPNNKEQREKEQSEALSLNNLKNVLFIFLEKLQVLRNYYSHYKYSEESPKPIFETSLLKNMYKVFDANVRLVKRDYMHHENIDMQRDFTHLNRKKQVGRTKNIIDSPNFHYHFADKEGNMTIAGLLFFVSLFLDKKDAIWMQKKLKGFKDGRNLREQMTNEVFCRSRISLPKLKLENVQTKDWMQLDMLNELVRCPKSLYERLREKDRESFKVPFDIFSDDYDAEEEPFKNTLVRHQDRFPYFVLRYFDLNEIFEQLRFQIDLGTYHFSIYNKRIGDEDEVRHLTHHLYGFARIQDFAPQNQPEEWRKLVKDLDHFETSQEPYISKTAPHYHLENEKIGIKFCSTHNNLFPSLKREKTCNGRSKFNLGTQFTAEAFLSVHELLPMMFYYLLLTKDYSRKESADKVEGIIRKEISNIYAIYDAFANNEINSIADLTCRLQKTNILQGHLPKQMISILEGRQKDMEKEAERKIGEMIDDTQRRLDLLCKQTNQKIRIGKRNAGLLKSGKIADWLVSDMMRFQPVQKDTNNAPINNSKANSTEYRMLQHALALFGSESSRLKAYFRQMNLVGNANPHPFLAETQWEHQTNILSFYRNYLEARKKYLKGLKPQNWKQYQHFLILKVQKTNRNTLVTGWKNSFNLPRGIFTQPIREWFEKHNNSKRIYDQILSFDRVGFVAKAIPLYFAEEYKDNVQPFYDYPFNIGNKLKPQKGQFLDKKERVELWQKNKELFKNYPSEKNKTDLAYLDFLSWKKFERELRLIKNQDIVTWLMFKELFKTTTVEGLKIGEIHLRDIDTNTANEESNNILNRIMPMKLPVKTYETDNKGNILKERPLATFYIEETETKVLKQGNFKVLAKDRRLNGLLSFAETTDIDLEKNPITKLSVDYELIKYQTTRISIFEMTLGLEKKLIDKYSTLPTDSFRNMLERWLQCKANRPELKNYVNSLIAVRNAFSHNQYPMYDATLFAEVKKFTLFPSVDTKKIELNIAPQLLEIVGKAIKEIEKSENKN

SEQ ID NO: 258 - protein, 1125 aa, Prevotella pallens
MKEEEKGKTPVVSTYNKDDKHFWAAFLNLARHNVYITVNHINKILGEGEINRDGYENTLEKSWNEIKDINKKDRLSKLIIKHFPFLEVTTYQRNSADTTKQKEEKQAEAQSLESLKKSFFVFIYKLRDLRNHYSHYKHSKSLERPKFEEDLQEKMYNIFDASIQLVKEDYKHNTDIKTEEDFKHLDRKGQFKYSFADNEGNITESGLLFFVSLFLEKKDAIWVQKKLEGFKCSNESYQKMTNEVFCRSRMLLPKLRLQSTQTQDWILLDMLNELIRCPKSLYERLREEDRKKFRVPIEIADEDYDAEQEPFKNALVRHQDRFPYFALRYFDYNEIFTNLRFQIDLGTYHFSIYKKQIGDYKESHHLTHKLYGFERIQEFTKQNRPDEWRKFVKTFNSFETSKEPYIPETTPHYHLENQKIGIRFRNDNDKIWPSLKTNSEKNEKSKYKLDKSFQAEAFLSVHELLPMMFYYLLLKTENTDNDNEIETKKKENKNDKQEKHKIEEIIENKITEIYALYDAFANGKINSIDKLEEYCKGKDIEIGHLPKQMIAILKSEHKDMATEAKRKQEEMLADVQKSLESLDNQINEEIENVERKNSSLKSGEIASWLVNDMMRFQPVQKDNEGNPLNNSKANSTEYQMLQRSLALYNKEEKPTRYFRQVNLIESSNPHPFLNNTEWEKCNNILSFYRSYLEAKKNFLESLKPEDWEKNQYFLMLKEPKTNCETLVQGWKNGFNLPRGIFTEPIRKWFMEHRKNITVAELKRVGLVAKVIPLFFSEEYKDSVQPFYNYLFNVGNINKPDEKNFLNCEERRELLRKKKDEFKKMTDKEKEENPSYLEFQSWNKFERELRLVRNQDIVTWLLCMELFNKKKIKELNVEKIYLKNINTNTTKKEKNTEEKNGEEKIIKEKNNILNRIMPMRLPIKVYGRENFSKNKKKKIRRNTFFTVYIEEKGTKLLKQGNFKALERDRRLGGLFSFVKTHSKAESKSNTISKSRVEYELGEYQKARIEIIKDMLALEETLIDKYNSLDTDNFHNMLTGWLKLKDEPDKASFQNDVDLLIAVRNAFSHNQYPMRNRIAFANINPFSLSSANTSEEKGLGIANQLKDKTHKTIEKIIEIEKPIETKE

SEQ ID NO: 259 - protein, 1125 aa, Prevotella pallens; identical to SEQ ID NO: 258

SEQ ID NO: 260 - protein, 1126 aa, Prevotella intermedia
MEDDKKTTDSIRYELKDKHFWAAFLNLARHNVYITVNHINKILEEGEINRDGYETTLKNTWNEIKDINKKDRLSKLIIKHFPFLEAATYRLNPTDTTKQKEEKQAEAQSLESLRKSFFVFIYKLRDLRNHYSHYKHSKSLERPKFEEGLLEKMYNIFNASIRLVKEDYQYNKDINPDEDFKHLDRTEEEFNYYFTKDNEGNITESGLLFFVSLFLEKKDAIWMQQKLRGFKDNRENKKKMTNEVFCRSRMLLPKLRLQSTQTQDWILLDMLNELIRCPKSLYERLREEDREKFRVPIEIADEDYDAEQEPFKNTLVRHQDRFPYFALRYFDYNEIFTNLRFQIDLGTYHFSIYKKQIGDYKESHHLTHKLYGFERIQEFTKQNRPDEWRKFVKTFNSFETSKEPYIPETTPHYHLENQKIGIRFRNDNDKIWPSLKTNSEKNEKSKYKLDKSFQAEAFLSVHELLPMMFYYLLLKTENTDNDNEIETKKKENKNDKQEKHKIEEIIENKITEIYALYDTFANGEIKSIDELEEYCKGKDIEIGHLPKQMIAILKDEHKVMATEAERKQEEMLVDVQKSLESLDNQINEEIENVERKNSSLKSGKIASWLVNDMMRFQPVQKDNEGKPLNNSKANSTEYQLLQRTLAFFGSEHERLAPYFKQTKLIESSNPHPFLKDTEWEKCNNILSFYRSYLEAKKNFLESLKPEDWEKNQYFLKLKEPKTKPKTLVQGWKNGFNLPRGIFTEPIRKWFMKHRENITVAELKRVGLVAKVIPLFFSEEYKDSVQPFYNYHFNVGNINKPDEKNFLNCEERRELLRKKKDEFKKMTDKEKEENPSYLEFKSWNKFERELRLVRNQDIVTWLLCMELFNKKKIKELNVEKIYLKNINTNTTKKEKNTEEKNGEEKNIKEKNNILNRIMPMRLPIKVYGRENFSKNKKKKIRRNTFFTVYIEEKGTKLLKQGNFKALERDRRLGGLFSFVKTPSKAESKSNTISKLRVEYELGEYQKARIEIIKDMLALEKTLIDKYNSLDTDNFNKMLTDWLELKGEPDKASFQNDVDLLIAVRNAFSHNQYPMRNRIAFANINPFSLSSANTSEEKGLGIANQLKDKTHKTIEKIIEIEKPIETKE

SEQ ID NO: 261 - protein, 1120 aa, Prevotella intermedia
MEDDKKTTDSIRYELKDKHFWAAFLNLARHNVYITVNHINKILEEDEINRDGYENTLENSWNEIKDINKKDRLSKLIIKHFPFLEATTYRQNPTDTTKQKEEKQAEAQSLESLKKSFFVFIYKLRDLRNHYSHYKHSKSLERPKFEEDLQNKMYNIFDVSIQFVKEDYKHNTDINPKKDFKHLDRKRKGKFHYSFADNEGNITESGLLFFVSLFLEKKDAIWVQKKLEGFKCSNKSYQKMTNEVFCRSRMLLPKLRLESTQTQDWILLDMLNELIRCPKSLYERLQGVNRKKFYVSFDPADEDYDAEQEPFKNTLVRHQDRFPYFALRYFDYNEVFANLRFQIDLGTYHFSIYKKLIGGQKEDRHLTHKLYGFERIQEFDKQNRPDEWKAIVKDSDTFKKKEEKEEEKPYISETTPHYHLENKKIGIAFKNHNIWPSTQTELTNNKRKKYNLGTSIKAEAFLSVHELLPMMFYYLLLKTENTKNDNKVGGKKETKKQGKHKIEAIIESKIKDIYALYDAFANGEINSEDELKEYLKGKDIKIVHLPKQMIAILKNEHKDMAEKAEAKQEKMKLATENRLKTLDKQLKGKIQNGKRYNSAPKSGEIASWLVNDMMRFQPVQKDENGESLNNSKANSTEYQLLQRTLAFFGSEHERLAPYFKQTKLIESSNPHPFLNDTEWEKCSNILSFYRSYLKARKNFLESLKPEDWEKNQYFLMLKEPKTNRETLVQGWKNGFNLPRGFFTEPIRKWFMEHWKSIKVDDLKRVGLVAKVTPLFFSEKYKDSVQPFYNYPFNVGDVNKPKEEDFLHREERIELWDKKKDKFKGYKAKKKFKEMTDKEKEEHRSYLEFQSWNKFERELRLVRNQDIVTWLLCTELIDKLKIDELNIKELKKLRLKDINTDTAKKEKNNILNRVMPMELPVTVYKVNKGGYIIKNKPLHTIYIKEAETKLLKQGNFKALVKDRRLNGLFSFVKTPSEAESESNPISKLRVEYELGKYQNARLDIIEDMLALEKKLIDKYNSLDTDNFHNMLTGWLELKGEAKKARFQNDVKLLTAVRNAFSHNQYPMYDENLFGNIERFSLSSSNIIESKGLDIAAKLKEEVSKAAKKIQNEEDNKKEKET

SEQ ID NO: 262 - protein, 1134 aa, Prevotella intermedia
MKMEDDKKTKESTNMLDNKHFWAAFLNLARHNVYITVNHINKVLELKNKKDQDIIIDNDQDILAIKTHWEKVNGDLNKTERLRELMTKHFPFLETAIYTKNKEDKEEVKQEKQAKAQSFDSLKHCLFLFLEKLQEARNYYSHYKYSESTKEPMLEKELLKKMYNIFDDNIQLVIKDYQHNKDINPDEDFKHLDRTEEEFNYYFTTNKKGNITASGLLFFVSLFLEKKDAIWMQQKLRGFKDNRESKKKMTHEVFCRSRMLLPKLRLESTQTQDWILLDMLNELIRCPKSLYERLQGEYRKKFNVPFDSADEDYDAEQEPFKNTLVRHQDRFPYFALRYFDYNEIFTNLRFQIDLGTYHFSIYKKLIGGQKEDRHLTHKLYGFERIQEFAKQNRTDEWKAIVKDFDTYETSEEPYISETAPHYHLENQKIGIRFRNDNDEIWPSLKTNGENNEKRKYKLDKQYQAEAFLSVHELLPMMFYYLLLKKEEPNNDKKNASIVEGFIKREIRDIYKLYDAFANGEINNIDDLEKYCEDKGIPKRHLPKQMVAILYDEHKDMAEEAKRKQKEMVKDTKKLLATLEKQTQGEIEDGGRNIRLLKSGEIARWLVNDMMRFQPVQKDNEGNPLNNSKANSTEYQMLQRSLALYNKEEKPTRYFRQVNLINSSNPHPFLKWTKWEECNNILSFYRSYLTKKIEFLNKLKPEDWEKNQYFLKLKEPKTNRETLVQGWKNGFNLPRGIFTEPIREWFKRHQNDSEEYEKVETLDRVGLVTKVIPLFFKKEDSKDKEEYLKKDAQKEINNCVQPFYGFPYNVGNIHKPDEKDFLPSEERKKLWGDKKYKFKGYKAKVKSKKLTDKEKEEYRSYLEFQSWNKFERELRLVRNQDIVTWLLCTELIDKLKVEGLNVEELKKLRLKDIDTDTAKQEKNNILNRVMPMQLPVTVYEIDDSHNIVKDRPLHTVYIEETKTKLLKQGNFKALVKDRRLNGLFSFVDTSSETELKSNPISKSLVEYELGEYQNARIETIKDMLLLEETLIEKYKTLPTDNFSDMLNGWLEGKDEADKARFQNDVKLLVAVRNAFSHNQYPMRNRIAFANINPFSLSSADTSEEKKLDIANQLKDKTHKIIKRIIEIEKPIETKE

SEQ ID NO: 263 - protein, 1133 aa, Prevotella intermedia
MEDDKKTTDSISYELKDKHFWAAFLNLARHNVYITVNHINKVLELKNKKDQDIIIDNDQDILAIKTHWEKVNGDLNKTERLRELMTKHFPFLETAIYSKNKEDKEEVKQEKQAKAQSFDSLKHCLFLFLEKLQETRNYYSHYKYSESTKEPMLEKELLKKMYNIFDDNIQLVIKDYQHNKDINPDEDFKHLDRTEEDFNYYFTRNKKGNITESGLLFFVSLFLEKKDAIWMQQKLRGFKDNRESKKKMTHEVFCRSRMLLPKLRLESTQTQDWILLDMLNELIRCPKSLYERLQGEDREKFKVPFDPADEDYDAEQEPFKNTLVRHQDRFPYFALRYFDYNEIFTNLRFQIDLGTFHFSIYKKLIGGQKEDRHLTHKLYGFERIQEFAKQNRPDEWKAIVKDLDTYETSNERYISETTPHYHLENQKIGIRFRNDNDEIWPSLKTNGENNEKSKYKLDKQYQAEAFLSVHELLPMMFYYLLLKKEEPNNDKKNASIVEGFIKREIRDMYKLYDAFANGEINNIDDLEKYCEDKGIPKRHLPKQMVAILYDEHKDMVKEAKRKQRKMVKDTEKLLAALEKQTQEKTEDGGRNIRLLKSGEIARWLVNDMMRFQPVQKDNEGNPLNNSKANSTEYQMLQRSLALYNKEEKPTRYFRQVNLINSSNPHPFLKWTKWEECNNILSFYRSYLTKKIEFLNKLKPEDWEKNQYFLKLKEPKTNRETLVQGWKNGFNLPRGIFTEPIREWFKRHQNDSKEYEKVEALDRVGLVTKVIPLFFKKEDSKDKEEDLKKDAQKEINNCVQPFYSFPYNVGNIHKPDEKDFLHREERIELWDKKKDKFKGYKAKVKSKKLTDKEKEEYRSYLEFQSWNKFERELRLVRNQDIVTWLLCTELIDKLKVEGLNVEELKKLRLKDIDTDTAKQEKNNILNRVMPMQLPVTVYEIDDSHNIVKDRPLHTVYIEETKTKLLKQGNFKALVKDRRLNGLFSFVDTSSEAELKSNPISKSLVEYELGEYQNARIETIKDMLLLEETLIEKYKNLPTDNFSDMLNGWLEGKDEADKARFQNDVKLLVAVRNAFSHNQYPMRNRIAFANINPFSLSSADTSEEKKLDIANQLKDKTHKIIKRIIEIEKPIETKE

SEQ ID NO: 264 - protein, 1125 aa, Prevotella intermedia
MKMEDDKKTTESTNMLDNKHFWAAFLNLARHNVYITVNHINKVLELKNKKDQDIIIDNDQDILAIKTHWEKVNGDLNKTERLRELMTKHFPFLETAIYTKNKEDKEEVKQEKQAEAQSLESLKDCLFLFLEKLQEARNYYSHYKYSESTKEPMLEEGLLEKMYNIFDDNIQLVIKDYQHNKDINPDEDFKHLDRKGQFKYSFADNEGNITESGLLFFVSLFLEKKDAIWMQQKLTGFKDNRESKKKMTHEVFCRRRMLLPKLRLESTQTQDWILLDMLNELIRCPKSLYERLQGEYRKKFNVPFDSADEDYDAEQEPFKNTLVRHQDRFPYFALRYFDYNEIFTNLRFQIDLGTYHFSIYKKLIGGQKEDRHLTHKLYGFERIQEFAKQNRPDEWKALVKDLDTYETSNERYISETTPHYHLENQKIGIRFRNGNKEIWPSLKTNGENNEKSKYKLDKPYQAEAFLSVHELLPMMFYYLLLKKEEPNNDKKNASIVEGFIKREIRDMYKLYDAFANGEINNIGDLEKYCEDKGIPKRHLPKQMVAILYDEPKDMVKEAKRKQKEMVKDTKKLLATLEKQTQEEIEDGGRNIRLLKSGEIARWLVNDMMRFQPVQKDNEGNPLNNSKANSTEYQMLQRSLALYNKEEKPTRYFRQVNLINSSNPHPFLKWTKWEECNNILSFYRNYLTKKIEFLNKLKPEDWEKNQYFLKLKEPKTNRETLVQGWKNGFNLPRGIFTEPIREWFKRHQNDSKEYEKVEALKRVGLVTKVIPLFFKEEYFKEDAQKEINNCVQPFYSFPYNVGNIHKPDEKDFLPSEERKKLWGDKKDKFKGYKAKVKSKKLTDKEKEEYRSYLEFQSWNKFERELRLVRNQDIVTWLLCTELIDKMKVEGLNVEELQKLRLKDIDTDTAKQEKNNILNRIMPMQLPVTVYEIDDSHNIVKDRPLHTVYIEETKTKLLKQGNFKALVKDRRLNGLFSFVDTSSKAELKDKPISKSVVEYELGEYQNARIETIKDMLLLEKTLIKKYEKLPTDNFSDMLNGWLEGKDESDKARFQNDVKLLVAVRNAFSHNQYPMRNRIAFANINPFSLSSADISEEKKLDIANQLKDKTHKIIKKIIEIEKPIETKE

SEQ ID NO: 265 - protein, 1124 aa, Prevotella aurantiaca
MEDDKKTTGSISYELKDKHFWAAFLNLARHNVYITINHINKLLEIREIDNDEKVLDIKTLWQKGNKDLNQKARLRELMTKHFPFLETAIYTKNKEDKKEVKQEKQAEAQSLESLKDCLFLFLDKLQEARNYYSHYKYSEFSKEPEFEEGLLEKMYNIFGNNIQLVINDYQHNKDINPDEDFKHLDRKGQFKYSFADNEGNITESGLLFFVSLFLEKKDAIWMQQKLNGFKDNLENKKKMTHEVFCRSRILMPKLRLESTQTQDWILLDMLNELIRCPKSLYERLQGDDREKFKVPFDPADEDYNAEQEPFKNTLIRHQDRFPYFVLRYFDYNEIFKNLRFQIDLGTYHFSIYKKLIGGQKEDRHLTHKLYGFERIQEFAKQNRPDEWKAIVKDLDTYETSNKRYISETTPHYHLENQKIGIRFRNGNKEIWPSLKTNDENNEKSKYKLDKQYQAEAFLSVHELLPMMFYYLLLKKEKPNNDEINASIVEGFIKREIRNIFKLYDAFANGEINNIDDLEKYCADKGIPKRHLPKQMVAILYDEHKDMVKEAKRKQKEMVKDTKKLLATLEKQTQKEKEDDGRNVKLLKSGEIARWLVNDMMRFQPVQKDNEGKPLNNSKANSTEYQMLQRSLALYNNEEKPTRYFRQVNLIESNNPHPFLKWTKWEECNNILTFYYSYLTKKIEFLNKLKPEDWKKNQYFLKLKEPKTNRETLVQGWKNGFNLPRGIFTEPIREWFKRHQNNSKEYEKVEALDRVGLVTKVIPLFFKEEYFKDKEENFKEDTQKEINDCVQPFYNFPYNVGNIHKPKEKDFLHREERIELWDKKKDKFKGYKEKIKSKKLTEKDKEEFRSYLEFQSWNKFERELRLVRNQDIVTWLLCKELIDKLKIDELNIEELKKLRLNNIDTDTAKKEKNNILNRVMPMELPVTVYEIDDSHKIVKDKPLHTIYIKEAETKLLKQGNFKALVKDRRLNGLFSFVKTNSEAESKRNPISKLRVEYELGEYQEARIEIIQDMLALEEKLINKYKDLPTNKFSEMLNSWLEGKDEADKARFQNDVDFLIAVRNAFSHNQYPMHNKIEFANIKPFSLYTANNSEEKGLGIANQLKDKTKETTDKIKKIEKPIETKE

SEQ ID NO: 266 - protein, 1133 aa, Prevotella falsenii
MKNDNNSTKSTDYTLGDKHFWAAFLNLARHNVYITVNHINKVLELKNKKDQEIIIDNDQDILAIKTLWGKVDTDINKKDRLRELIMKHFPFLEAATYQQSSTNNTKQKEEEQAKAQSFESLKDCLFLFLEKLREARNYYSHYKHSKSLEEPKLEEKLLENMYNIFDTNVQLVIKDYEHNKDINPEEDFKHLGRAEGEFNYYFTRNKKGNITESGLLFFVSLFLEKKDAIWAQTKIKGFKDNRENKQKMTHEVFCRSRMLLPKLRLESTQTQDWILLDMLNELIRCPKSLYKRLQGEKREKFRVPFDPADEDYDAEQEPFKNTLVRHQDRFPYFALRYFDYNEIFTNLRFQIDLGTYHFSIYKKQIGDKKEDRHLTHKLYGFERIQEFAKENRPDEWKALVKDLDTFEESNEPYISETTPHYHLENQKIGIRNKNKKKKKTIWPSLETKTTVNERSKYNLGKSFKAEAFLSVHELLPMMFYYLLLNKEEPNNGKINASKVEGIIEKKIRDIYKLYGAFANEEINNEEELKEYCEGKDIAIRHLPKQMIAILKNEYKDMAKKAEDKQKKMIKDTKKRLAALDKQVKGEVEDGGRNIKPLKSGRIASWLVNDMMRFQPVQRDRDGYPLNNSKANSTEYQLLQRTLALFGSERERLAPYFRQMNLIGKDNPHPFLKDTKWKEHNNILSFYRSYLEAKKNFLGSLKPEDWKKNQYFLKLKEPKTNRETLVQGWKNGFNLPRGIFTEPIREWFIRHQNESEEYKKVKDFDRIGLVAKVIPLFFKEDYQKEIEDYVQPFYGYPFNVGNIHNSQEGTFLNKKEREELWKGNKTKFKDYKTKEKNKEKTNKDKFKKKTDEEKEEFRSYLDFQSWKKFERELRLVRNQDIVTWLLCMELIDKLKIDELNIEELQKLRLKDIDTDTAKKEKNNILNRIMPMELPVTVYETDDSNNIIKDKPLHTIYIKEAETKLLKQGNFKALVKDRRLNGLFSFVETSSEAELKSKPISKSLVEYELGEYQRARVEIIKDMLRLEETLIGNDEKLPTNKFRQMLDKWLEHKKETDDTDLKNDVKLLTEVRNAFSHNQYPMRDRIAFANIKPFSLSSANTSNEEGLGIAKKLKDKTKETIDRIIEIEEQTATKR

SEQ ID NO: 267 - protein, 1175 aa, Porphyromonas gulae
MTEQSERPYNGTYYTLEDKHFWAAFLNLARHNAYITLTHIDRQLAYSKADITNDQDVLSFKALWKNLDNDLERKSRLRSLILKHFSFLEGAAYGKKLFESKSSGNKSSKNKELTKKEKEELQANALSLDNLKSILFDFLQKLKDFRNYYSHYRHSGSSELPLFDGNMLQRLYNVFDVSVQRVKRDHEHNDKVDPHRHFNHLVRKGKKDRYGHNDNPSFKHHFVDSEGMVTEAGLLFFVSLFLEKRDAIWMQKKIRGFKGGTETYQQMTNEVFCRSRISLPKLKLESLRMDDWMLLDMLNELVRCPKPLYDRLREDDRACFRVPVDILPDEDDTDGGGEDPFKNTLVRHQDRFPYFALRYFDLKKVFTSLRFHIDLGTYHFAIYKKMIGEQPEDRHLTRNLYGFGRIQDFAEEHRPEEWKRLVRDLDYFETGDKPYISQTSPHYHIEKGKIGLRFMPEGQHLWPSPEVGTTRTGRSKYAQDKRLTAEAFLSVHELMPMMFYYFLLREKYSEEVSAEKVQGRIKRVIEDVYAIYDAFARDEINTLKELDACLADKGIRRGHLPKQMIAILSQEHKNMEEKVRKKLQEMIADTDHRLDMLDRQTDRKIRIGRKNAGLPKSGVIADWLVRDMMRFQPVAKDASGKPLNNSKANSTEYRMLQRALALFGGEKERLTPYFRQMNLTGGNNPHPFLHDTRWESHTNILSFYRSYLRARKAFLERIGRSDRMENRPFLLLKEPKTDRQTLVAGWKSEFHLPRGIFTEAVRDCLIEMGYDEVGSYREVGFMAKAVPLYFERACEDRVQPFYDSPFNVGNSLKPKKGRFLSKEERAEEWERGKERFRDLEAWSHSAARRIEDAFAGIEYASPGNKKKIEQLLRDLSLWEAFESKLKVRADKINLAKLKKEILEAQEHPYHDFKSWQKFERELRLVKNQDIITWMMCRDLMEENKVEGLDTGTLYLKDIRTNVQEQGSLNVLNHVKPMRLPVVVYRADSRGHVHKEEAPLATVYIEERDTKLLKQGNFKSFVKDRRLNGLFSFVDTGGLAMEQYPISKLRVEYELAKYQTARVCAFEQTLELEESLLTRYPHLPDKNFRKMLESWSDPLLAKWPELHGKVRLLIAVRNAFSHNQYPMYDEAVFSSIRKYDPSSPDAIEERMGLNIAHRLSEEVKQAKETVERIIQA

SEQ ID NO: 268 - protein, 1175 aa, Unknown
  Porphyromonas sp.
MTEQSERPYNGTYYTLEDKHFWAAFLNLARHNAYITLTHIDRQLAYSKADITNDQDVLSFKALWKNFDNDLERKSRLRSLILKHFSFLEGAAYGKKLFESKSSGNKSSKNKELTKKEKEELQANALSLDNLKSILFDFLQKLKDFRNYYSHYRHSESSELPLFDGNMLQRLYNVFDVSVQRVKRDHEHNDKVDPHRHFNHLVRKGKKDRYGHNDNPSFKHHFVDSEGMVTEAGLLFFVSLFLEKRDAIWMQKKIRGFKGGTETYQQMTNEVFCRSRISLPKLKLESLRTDDWMLLDMLNELVRCPKPLYDRLREDDRACFRVPVDILPDEDDTDGGGEDPFKNTLVRHQDRFPYFALRYFDLKKVFTSLRFHIDLGTYHFAIYKKMIGEQPEDRHLTRNLYGFGRIQDFAEEHRPEEWKRLVRDLDYFETGDKPYISQTTPHYHIEKGKIGLRFVPEGQHLWPSPEVGTTRTGRSKYAQDKRLTAEAFLSVHELMPMMFYYFLLREKYSEEVSAEKVQGRIKRVIEDVYAIYDAFARDEINTLKELDACLADKGIRRGHLPKQMIGILSQERKDMEEKVRKKLQEMIADTDHRLDMLDRQTDRKIRIGRKNAGLPKSGVIADWLVRDMMRFQPVAKDTSGKPLNNSKANSTEYRMLQRALALFGGEKERLTPYFRQMNLTGGNNPHPFLHETRWESHTNILSFYRSYLRARKAFLERIGRSDRVENCPFLLLKEPKTDRQTLVAGWKGEFHLPRGIFTEAVRDCLIEMGYDEVGSYREVGFMAKAVPLYFERACEDRVQPFYDSPFNVGNSLKPKKGRFLSKEDRAEEWERGKERFRDLEAWSHSAARRIKDAFAGIEYASPGNKKKIEQLLRDLSLWEAFESKLKVRADKINLAKLKKEILEAQEHPYHDFKSWQKFERELRLVKNQDIITWMMCRDLMEENKVEGLDTGTLYLKDIRPNVQEQGSLNVLNRVKPMRLPVVVYRADSRGHVHKEEAPLATVYIEERDTKLLKQGNFKSFVKDRRLNGLFSFVDTGGLAMEQYPISKLRVEYELAKYQTARVCVFELTLRLEESLLSRYPHLPDESFREMLESWSDPLLAKWPELHGKVRLLIAVRNAFSHNQYPMYDEAVFSSIRKYDPSSPDAIEERMGLNIAHRLSEEVKQAKETVERIIQA

SEQ ID NO: 269 - protein, 1174 aa, Porphyromonas gulae
MTEQSERPYNGTYYTLEDKHFWAAFLNLARHNAYITLTHIDRQLAYSKADITNDQDVLSFKALWKNLDNDLERKSRLRSLILKHFSFLEGAAYGKKLFESKSSGNKSSKNKELTKKEKEELQANALSLDNLKSILFDFLQKLKDFRNYYSHYRHSGSSELPLFDGNMLQRLYNVFDVSVQRVKRDHEHNDKVDPHYHFNHLVRKGKKDRYGHNDNPSFKHHFVDSEGMVTEAGLLFFVSLFLEKRDAIWMQKKIRGFKGGTGPYEQMTNEVFCRSRISLPKLKLESLRTDDWMLLDMLNELVRCPKPLYDRLREKDRACFRVPVDILPDEDDTDGGGEDPFKNTLVRHQDRFPYFALRYFDLKKVFTSLRFHIDLGTYHFAIYKKMIGEQPEDRHLTRNLYGFGRIQDFAEEHRPEEWKRLVRDLDYLETGDKPYISQTTPHYHIEKGKIGLRFVPEGQHLWPSPEVGTTRTGRSKCAQDKRLTAEAFLSVHELMPMMFYYFLLREKYSEEVSAEKVQGRIKRVIEDVYAIYDAFARDEINTLKELDTCLADKGIRRGHLPKQMITILSQERKDMKEKIRKKLQEMIADTDHRLDMLDRQTDRKIRIGRKNAGLPKSGVIADWLVRDMMRFQPVAKDASGKPLNNSKANSTEYRMLQRALALFGGEKERLTPYFRQMNLTGGNNPHPFLHETRWESHTNILSFYRSYLRARKAFLERIGRSDRVENCPFLLLKEPKTDRQTLVAGWKDEFHLPRGIFTEAVRDCLIEMGYDEVGSYREVGFMAKAVPLYFERACEDRVQPFYDSPFNVGNSLKPKKGRFLSKEDRAEEWERGMERFRDLEAWSHSAARRIKDAFAGIEYASPGNKKKIEQLLRDLSLWEAFESKLKVRADKINLAKLKKEILEAQEHPYHDFKSWQKFERELRLVKNQDIITWMMCRDLMEENKVEGLDTGTLYLKDIRPNVQEQGSLNVLNRVKPMRLPVVVYRADSRGHVHKEAPLATVYIEERNTKLLKQGNFKSFVKDRRLNGLFSFVDTGGLAMEQYPISKLRVEYELAKYQTARVCVFELTLRLEESLLSRYPHLPDESFREMLESWSDPLLAKWPELHGKVRLLIAVRNAFSHNQYPMYDEAVFSSIRKYDPSSPDAIEERMGLNIAHRLSEEVKQAKETVERIIQA

SEQ ID NO: 270 - protein, 1175 aa, Porphyromonas gulae
MTEQSERPYNGTYYTLEDKHFWAAFLNLARHNAYITLTHIDRQLAYSKADITNDQDVLSFKALWKNFDNDLERKSRLRSLILKHFSFLEGAAYGKKLFESKSSGNKSSKNKELTKKEKEELQANALSLDNLKSILFDFLQKLKDFRNYYSHYRHSESSELPLFDGNMLQRLYNVFDVSVQRVKRDHEHNDKVDPHRHFNHLVRKGKKDRYGHNDNPSFKHHFVDGEGMVTEAGLLFFVSLFLEKRDAIWMQKKIRGFKGGTETYQQMTNEVFCRSRISLPKLKLESLRTDDWMLLDMLNELVRCPKPLYDRLREDDRACFRVPVDILPDEDDTDGGGEDPFKNTLVRHQDRFPYFALRYFDLKKVFTSLRFHIDLGTYHFAIYKKMIGEQPEDRHLTRNLYGFGRIQDFAEEHRPEEWKRLVRDLDYFETGDKPYISQTSPHYHIEKGKIGLRFMPEGQHLWPSPEVGTTRTGRSKYAQDKRLTAEAFLSVHELMPMMFYYFLLREKYSEEVSAEKVQGRIKRVIEDVYAIYDAFARDEINTLKELDACLADKGIRRGHLPKQMIAILSQEHKDMEEKIRKKLQEMIADTDHRLDMLDRQTDRKIRIGRKNAGLPKSGVIADWLVRDMMRFQPVAKDTSGKPLNNSKANSTEYRMLQRALALFGGEKKRLTPYFRQMNLTGGNNPHPFLHETRWESHTNILSFYRSYLRARKAFLERIGRSDRMENRPFLLLKEPKTDRQTLVAGWKSEFHLPRGIFTEAVRDCLIEMGYDEVGSYREVGFMAKAVPLYFERACEDRVQPFYDSPFNVGNSLKPKKGRFLSKEERAEEWERGKERFRDLEAWSHSAARRIEDAFAGIEYASPGNKKKIEQLLRDLSLWEAFESKLKVRADKINLAKLKKEILEAQEHPYHDFKSWQKFERELRLVKNQDIITWMMCRDLMEENKVEGLDTGTLYLKDIRPNVQEQGSLNVLNRVKPMRLPVVVYRADSRGHVHKEEAPLATVYIEERDTKLLKQGNFKSFVKDRRLNGLFSFVDTGGLAMEQYPISKLRVEYELAKYQTARVCVFELTLRLEESLLTRYPHLPDESFRKMLESWSDPLLAKWPELHGKVRLLIAVRNAFSHNQYPMYDEAVFSSIRKYDPSSPDAIEERMGLNIAHRLSEEVKQAKETVERIIQV

SEQ ID NO: 271 - protein, 1175 aa, Porphyromonas gulae
MTEQSERPYNGTYYTLEDKHFWAAFLNLARHNAYITLTHIDRQLAYSKADITNDQDVLSFKALWKNFDNDLERKSRLRSLILKHFSFLEGAAYGKKLFESKSSGNKSSKNKELTKKEKEELQANALSLDNLKSILFDFLQKLKDFRNYYSHYRHSESSELPLFDGNMLQRLYNVFDVSVQRVKRDHEHNDKVDPHRHFNHLVRKGKKDRYGHNDNPSFKHHFVDSEGMVTEAGLLFFVSLFLEKRDAIWMQKKIRGFKGGTETYQQMTNEVFCRSRISLPKLKLESLRTDDWMLLDMLNELVRCPKPLYDRLREKDRARFRVPVDILPDEDDTDGGGEDPFKNTLVRHQDRFPYFALRYFDLKKVFTSLRFHIDLGTYHFAIYKKMIGEQPEDRHLTRNLYGFGRIQDFAEEHRPEEWKRLVRDLDYFETGDKPYISQTTPHYHIEKGKIGLRFMPEGQHLWPSPEVGTTRTGRSKYAQDKRLTAEAFLSVHELMPMMFYYFLLREKYSEEVSAEKVQGRIKRVIEDVYAIYDAFARDEINTLKELDACLADKGIRRGHLPKQMIAILSQEHKDMEEKIRKKLQEMIADTDHRLDMLDRQTDRKIRIGRKNAGLPKSGVIADWLVRDMMRFQPVAKDTSGKPLNNSKANSTEYRMLQRALALFGGEKKRLTPYFRQMNLTGGNNPHPFLHETRWESHTNILSFYRSYLRARKAFLERIGRSDRMENRPFLLLKEPKTDRQTLVAGWKSEFHLPRGIFTEAVRDCLIEMGYDEVGSYREVGFMAKAVPLYFERACEDRVQPFYDSPFNVGNSLKPKKGRFLSKEERAEEWERGKERFRDLEAWSHSAARRIEDAFAGIEYASPGNKKKIEQLLRDLSLWEAFESKLKVRADKINLAKLKKEILEAQEHPYHDFKSWQKFERELRLVKNQDIITWMMCRDLMEENKVEGLDTGTLYLKDIRPNVQEQGSLNVLNRVKPMRLPVVVYRADSRGHVHKEEAPLATVYIEERDTKLLKQGNFKSFVKDRRLNGLFSFVDTGGLAMEQYPISKLRVEYELAKYQTARVCVFELTLRLEESLLTRYPHLPDESFRKMLESWSDPLLAKWPELHGKVRLLIAVRNAFSHNQYPMYDEAVFSSIRKYDPSSPDAIEERMGLNIAHRLSEEVKQAKETVERIIQV

SEQ ID NO: 272 - protein, 1175 aa, Porphyromonas gulae
MTEQSERPYNGTYYTLEDKHFWAAFLNLARHNAYITLTHIDRQLAYSKADITNDQDVLSFKALWKNFDNDLERKSRLRSLILKHFSFLEGAAYGKKLFESKSSGNKSSKNKELTKKEKEELQANALSLDNLKSILFDFLQKLKDFRNYYSHYRHSGSSELPLFDGNMLQRLYNVFDVSVQRVKIDHEHNDEVDPHYHFNHLVRKGKKDRYGHNDNPSFKHHFVDGEGMVTEAGLLFFVSLFLEKRDAIWMQKKIRGFKGGTETYQQMTNEVFCRSRISLPKLKLESLRMDDWMLLDMLNELVRCPKPLYDRLREDDRACFRVPVDILPDEDDTDGGGEDPFKNTLVRHQDRFPYFALRYFDLKKVFTSLRFHIDLGTYHFAIYKKMIGEQPEDRHLTRNLYGFGRIQDFAEEHRPEEWKRLVRDLDYFETGDKPYISQTSPHYHIEKGKIGLRFMPEGQHLWPSPEVGTTRTGRSKYAQDKRLTAEAFLSVHELMPMMFYYFLLREKYSEEVSAERVQGRIKRVIEDVYAVYDAFARDEINTRDELDACLADKGIRRGHLPRQMIAILSQEHKDMEEKIRKKLQEMMADTDHRLDMLDRQTDRKIRIGRKNAGLPKSGVIADWLVRDMMRFQPVAKDASGKPLNNSKANSTEYRMLQRALALFGGEKERLTPYFRQMNLTGGNNPHPFLHETRWESHTNILSFYRSYLRARKAFLERIGRSDRVENRPFLLLKEPKTDRQTLVAGWKGEFHLPRGIFTEAVRDCLIEMGHDEVASYKEVGFMAKAVPLYFERACEDRVQPFYDSPFNVGNSLKPKKGRFLSKEERAEEWERGKERFRDLEAWSYSAARRIEDAFAGIEYASPGNKKKIEQLLRDLSLWEAFESKLKVRADRINLAKLKKEILEAQEHPYHDFKSWQKFERELRLVKNQDIITWMMCRDLMEENKVEGLDTGTLYLKDIRPNVQEQGSLNVLNRVKPMRLPVVVYRADSRGHVHKEEAPLATVYIEERDTKLLKQGNFKSFVKDRRLNGLFSFVDTGGLAMEQYPISKLRVEYELAKYQTARVCVFELTLRLEESLLTRYPHLPDESFREMLESWSDPLLAKWPELHGKVRLLIAVRNAFSHNQYPMYDEAVFSSIRKYDPSSPDAIEERMGLNIAHRLSEEVKQAKETVERIIQA

SEQ ID NO: 273 - protein, 1119 aa, Porphyromonas gulae
MTEQSERPYNGTYYTLEDKHFWAAFLNLARHNAYITLTHIDRQLAYSKADITNDQDVLSFKALWKNLDNDLERKSRLRSLILKHFSFLEGAAYGKKLFESKSSGNKSSKNKELTKKEKEELQANALSLDNLKSILFDFLQKLKDFRNYYSHYRHSGSSELPLFDGNMLQRLYNVFDVSVQRVKRDHEHNDKVDPHRHFNHLVRKGKKDRYGHNDNPSFKHHFVDGEGMVTEAGLLFFVSLFLEKRDAIWMQKKIRGFKGGTETYQQMTNEVFCRSRISLPKLKLESLRTDDWMLLDMLNELVRCPKPLYDRLREKDRARFRVPVDILPDEDDTDGGGEDPFKNTLVRHQDRFPYFALRYFDLKKVFTSLRFHIDLGTYHFAIYKKVIGEQPEDRHLTRNLYGFGRIQDFAEEHRPEEWKRLVRDLDYFETGDKPYISQTTPHYHIEKGKIGLRFVPEGQHLWPSPEVGTTRTGRSKYAQDKRLTAEAFLSVHELMPMMFYYFLLREKYSEEVSAEKVQGRIKRVIEDVYAIYDAFARDEINTRDELDACLADKGIRRGHLPKQMIGILSQEHKNMEEKVRKKLQEMIADTDHRLDMLDRQTDRKIRIGRKNAGLPKSGVIADWLVRDMMRFQPVAKDTSGKPLNNSKANSTEYRMLQRALALFGGEKERLTPYFRQMNLTGGNNPHPFLDETRWESHTNILSFYRSYLRARKAFLERIGRSDRVENRPFLLLKEPKTDRQTLVAGWKSEFHLPRGIFTEAVRDCLIEMGYDEVGSYKEVGFMAKAVPLYFERACKDRVQPFYDSPFNVGNSLKPKKGRFLSKEKRAEEWESGKERFRLAKLKKEILEAQEHPYHDFKSWQKFERELRLVKNQDIITWMMCRDLMEENKVEGLDTGTLYLKDIRPNVQEQGSLNVLNRVKPMRLPVVVYRADSRGHVHKEEAPLATVYIEERDTKLLKQGNFKSFVKDRRLNGLFSFVDTGGLAMEQYPISKLRVEYELAKYQTARVCVFELTLRLEESLLSRYPHLPDESFREMLESWSDPLLAKWPELHGKVRLLIAVRNAFSHNQYPMYDEAVFSSIRKYDPSSPDAIEERMGLNIAHRLSEEVKQAKETVERIIQA

SEQ ID NO: 274 - protein, 1119 aa, Porphyromonas gulae
MTEQSERPYNGTYYTLEDKHFWAAFLNLARHNAYITLTHIDRQLAYSKADITNDQDVLSFKALWKNFDNDLERKSRLRSLILKHFSFLEGAAYGKKLFESKSSGNKSSKNKELTKKEKEELQANALSLDNLKSILFDFLQKLKDFRNYYSHYRHSGSSELPLFDGNMLQRLYNVFDVSVQRVKRDHEHNDKVDPHYHFNHLVRKGKKDRYGHNDNPSFKHHFVDSEGMVTEAGLLFFVSLFLEKRDAIWMQKKIRGFKGGTGPYEQMTNEVFCRSRISLPKLKLESLRTDDWMLLDMLNELVRCPKPLYDRLREKDRACFRVPVDILPDEDDTDGGGEDPFKNTLVRHQDRFPYFALRYFDLKKVFTSLRFHIDLGTYHFAIYKKMIGEQPEDRHLTRNLYGFGRIQDFAEEHRPEEWKRLVRDLDYFETGDKPYISQTTPHYHIEKGKIGLRFMPEGQHLWPSPEVGTTRTGRSKYAQDKRLTAEAFLSVHELMPMMFYYFLLREKYSEEVSAEKVQGRIKRVIKDVYAIYDAFARDEINTLKELDACSADKGIRRGHLPKQMIGILSQEHKNMEEKVRKKLQEMIADTDHRLDMLDRQTDRKIRIGRKNAGLPKSGVIADWLVRDMMRFQPVAKDTSGKPLNNSKANSTEYRMLQRALALFGGEKERLTPYFRQMNLTGGNNPHPFLDETRWESHTNILSFYRSYLRARKAFLERIGRSDRVENRPFLLLKEPKNDRQTLVAGWKSEFHLPRGIFTEAVRDCLIEMGYDEVGSYKEVGFMAKAVPLYFERACKDRVQPFYDSPFNVGNSLKPKKGRFLSKEKRAEEWESGKERFRLAKLKKEILEAKEHPYHDFKSWQKFERELRLVKNQDIITWMMCRDLMEENKVEGLDTGTLYLKDIRTDVHEQGSLNVLNRVKPMRLPVVVYRADSRGHVHKEQAPLATVYIEERDTKLLKQGNFKSFVKDRRLNGLFSFVDTGGLAMEQYPISKLRVEYELAKYQTARVCAFEQTLELEESLLTRYPHLPDENFREMLESWSDPLLGKWPDLHGKVRLLIAVRNAFSHNQYPMYDEAVFSSIRKYDPSSPDAIEERMGLNIAHRLSEEVKQAKETVERIIQA

SEQ ID NO: 275 - protein, 1119 aa, Porphyromonas gulae
MTEQSERPYNGTYYTLEDKHFWAAFLNLARHNAYITLTHIDRQLAYSKADITNDEDILFFKGQWKNLDNDLERKSRLRSLILKHFSFLEGAAYGKKFFESKSSGNKSSKNKELTKKEKEELQANALSLDNLKSILFDFLQKLKDFRNYYSHYRHSGSSELPLFDGNMLQRLYNVFDVSVQRVKRDHEHNDEVDPHYHFNHLVRKGKKDRYGHNDNPSFKHHFVDGEGMVTEAGLLFFVSLFLEKRDAIWMQKKIRGFKGGTEPYEQMTNEVFCRSRISLPKLKLESLRTDDWMLLDMLNELVRCPKPLYDRLREKDRACFRVPVDILPDEDDTDGGGEDPFKNTLVRHQDRFPYFALRYFDLKKVFTSLRFHIDLGTYHFAIYKKMIGEQPEDRHLTRNLYGFGRIQDFAEEHRPEEWKRLVRDLDYFETGDKPYISQTTPHYHIEKGKIGLRFVPEGQHLWPSPEVGTTRTGRSKYAQDKRLTAEAFLSVHELMPMMFYYFLLREKYSEEVSAEKVQGRIKRVIEDVYAIYDAFARDEINTLKELDACLADKGIRRGHLPKQMIGILSQERKDMEEKVRKKLQEMIADTDHRLDMLDRQTDRKIRIGRKNAGLPKSGVIADWLVRDMMRFQPVAKDTSGKPLNNSKANSTEYRMLQRALALFGGEKERLTPYFRQMNLTGGNNPHPFLHETRWESHTNILSFYRSYLRARKAFLERIGRSDRVENCPFLLLKEPKTDRQTLVAGWKGEFHLPRGIFTEAVRDCLIEMGYDEVGSYREVGFMAKAVPLYFERACEDRVQPFYDSPFNVGNSLKPKKGRFLSKEKRAEEWESGKERFRLAKLKKEILEAQEHPYHDFKSWQKFERELRLVKNQDIITWMMCRDLMEENKVEGLDTGTLYLKDIRPNVQEQGSLNVLNRVKPMRLPVVVYRADSRGHVHKEEAPLATVYIEERDTKLLKQGNFKSFVKDRRLNGLFSFVDTGALAMEQYPISKLRVEYELAKYQTARVCAFEQTLELEESLLTRYPHLPDESFREMLESWSDPLLTKWPELHGKVRLLIAVRNAFSHNQYPMYDEAVFSSIWKYDPSSPDAIEERMGLNIAHRLSEEVKQAKETIERIIQA

SEQ ID NO: 276 - protein, 1119 aa, Porphyromonas gingivalis
MTEQNEKPYNGTYYTLEDKHFWAAFFNLARHNAYITLAHIDRQLAYSKADITNDEDILFFKGQWKNLDNDLERKARLRSLILKHFSFLEGAAYGKKLFESQSSGNKSSKNKELTKKEKEELQANALSLDNLKSILFDFLQKLKDFRNYYSHYRHPESSELPLFDGNMLQRLYNVFDVSVQRVKRDHEHNDKVDPHRHFNHLVRKGKKDRYGNNDNPFFKHHFVDREGTVTEAGLLFFVSLFLEKRDAIWMQKKIRGFKGGTETYQQMTNEVFCRSRISLPKLKLESLRTDDWMLLDMLNELVRCPKSLYDRLREEDRARFRVPVDILSDEEDTDGAEEDPFKNTLVRHQDRFPYFALRYFDLKKVFTSLRFQIDLGTYHFAIYKKNIGEQPEDRHLTRNLYGFGRIQDFAEEHRPEEWKRLVRDLDYFETGDKPYITQTTPHYHIEKGKIGLRFVPEGQHLWPSPEVGATRTGRSKYAQDKRFTAEAFLSAHELMPMMFYYFLLREKYSEEASAERVQGRIKRVIEDVYAVYDAFARDEINTRDELDACLADKGIRRGHLPRQMIGILSQEHKDMEEKIRKKLQEMMADTDHRLDMLDRQTDRKIRIGRKNAGLPKSGVIADWLVRDMMRFQPVAKDTSGKPLNNSKANSTEYRMLQRALALFGGEKERLTPYFRQMNLTGGNNPHPFLHETRWESHTNILSFYRSYLKARKAFLQSIGRSDRVENHRFLLLKEPKTDRQTLVAGWKGEFHLPRGIFTEAVRDCLIEMGLDEVGSYKEVGFMAKAVPLYFERACKDWVQPFYNYPFNVGNSLKPKKGRFLSKEKRAEEWESGKERFRLAKLKKEILEAKEHPYLDFKSWQKFERELRLVKNQDIITWMICGDLMEENKVEGLDTGTLYLKDIRTDVQEQGSLNVLNRVKPMRLPVVVYRADSRGHVHKEQAPLATVYIEERDTKLLKQGNFKSFVKDRRLNGLFSFVDTGALAMEQYPISKLRVEYELAKYQTARVCAFEQTLELEESLLTRCPHLPDKNFRKMLESWSDPLLDKWPDLHRKVRLLIAVRNAFSHNQYPMYDEAVFSSIRKYDPSFPDAIEERMGLNIAHRLSEEVKQAKETVERIIQA

SEQ ID NO: 277 - protein, 1119 aa, Porphyromonas gingivalis
MTEQNERPYNGTYYTLEDKHFWAAFFNLARHNAYITLAHIDRQLAYSKADITNDEDILFFKGQWKNLDNDLERKARLRSLILKHFSFLEGAAYGKKLFESQSSGNKSSKKKELTKKEKEELQANALSLDNLKSILFDFLQKLKDFRNYYSHYRHPESSELPLFDGNMLQRLYNVFDVSVQRVKRDHEHNDKVDPHRHFNHLVRKGKKDRYGNNDNPFFKHHFVDREEKVTEAGLLFFVSLFLEKRDAIWMQKKIRGFKGGTETYQQMTNEVFCRSRISLPKLKLESLRTDDWMLLDMLNELVRCPKSLYDRLREEDRARFRVPVDILSDEDDTDGTEEDPFKNTLVRHQDRFPYFALRYFDLKKVFTSLRFHIDLGTYHFAIYKKNIGEQPEDRHLTRNLYGFGRIQDFAEEHRPEEWKRLVRDLDYFETGDKPYITQTTPHYHIEKGKIGLRFVPEGQHLWPSPEVGATRTGRSKYAQDKRLTAEAFLSVHELMPMMFYYFLLREKYSDEASAERVQGRIKRVIEDVYAVYDAFARGEINTRDELDACLADKGIRRGHLPRQMIGILSQEHKDMEEKVRKKLQEMIVDTDHRLDMLDRQTDRKIRIGRKNAGLPKSGVIADWLVRDMMRFQPVAKDTSGKPLNNSKANSTEYRMLQRALALFGGEKERLTPYFRQMNLTGGNNPHPFLHETRWESHTNILSFYRSYLKARKAFLQSIGRSDRVENHRFLLLKEPKTDRQTLVAGWKGEFHLPRGIFTEAVRDCLIEMGLDEVGSYKEVGFMAKAVPLYFERACKDRVQPFYDYPFNVGNSLKPKKGRFLSKEKRAEEWESGKERFRLAKLKKEILEAKEHPYLDFKSWQKFERELRLVKNQDIITWMICRDLMEENKVEGLDTGTLYLKDIRTDVQEQGNLNVLNRVKPMRLPVVVYRADSRGHVHKEQAPLATVYIEERDTKLLKQGNFKSFVKDRRLNGLFSFVDTGALAMEQYPISKLRVEYELAKYQTARVCAFEQTLELEESLLTRYPHLPDKNFRKMLESWSDPLLDKWPDLHGNVRLLIAVRNAFSHNQYPMYDEAVFSSIRKYDPSSPDAIEERMGLNIAHRLSEEVKQAKEMAERIIQA

SEQ ID NO: 278 - protein, 1175 aa, Porphyromonas gingivalis
MTEQNEKPYNGTYYTLKDKHFWAAFFNLARHNAYITLTHIDRQLAYSKADITNDEDILFFKGQWKNLDNDLERKARLRSLILKHFSFLEGAAYGKKLFESQSSGNKSSKKKELTKKEKEELQANALSLDNLKSILFDFLQKLKDFRNYYSHYRHPESSELPMFDGNMLQRLYNVFDVSVQRVKRDHEHNDKVDPHRHFNHLVRKGKKDRCGNNDNPFFKHHFVDREGKVTEAGLLFFVSLFLEKRDAIWMQKKIRGFKGGTETYQQMTNEVFCRSRISLPKLKLESLRTDDWMLLDMLNELVRCPKSLYDRLREEDRACFRVPVDILSDEDDTDGAEEDPFKNTLVRHQDRFPYFALRYFDLKKVFTSLRFHIDLGTYHFAIYKKNIGEQPEDRHLTRNLYGFGRIQDFAEEHRPEEWKRLVRDLDCFETGDKPYITQTTPHYHIEKGKIGLRFVPEGQHLWPSPEVGATRTGRSKYAQDKRFTAEAFLSVHELMPMMFYYFLLREKYSEEVSAERVQGRIKRVIEDVYAVYDAFARDEINTRDELDACLADKGIRRGHLPRQMIAILSQKHKDMEEKVRKKLQEMIADTDHRLDMLDRQTDRKIRIGRKNAGLPKSGVIADWLVRDMMRFQPVAKDTSGKPLNNSKANSTEYRMLQRALALFGGEKERLTPYFRQMNLTGGNNPHPFLHETRWESHTNILSFYRSYLKARKAFLQSIGRSDRVENHRFLLLKEPKTDRQTLVAGWKGEFHLPRGIFTEAVRDCLIEMGLDEVGSYKEVGFMAKAVPLYFERACKDRVQPFYDYPFNVGNSLKPKKGRFLSKEKRAEEWESGKERFRDLEAWSHSAARRIEDAFAGIENASRENKKKIEQLLQDLSLWETFESKLKVKADKINIAKLKKEILEAKEHPYLDFKSWQKFERELRLVKNQDIITWMMCRDLMEENKVEGLDTGTLYLKDIRTDVQEQGSLNVLNHVKPMRLPVVVYRADSRGHVHKEQAPLATVYIEERDTKLLKQGNFKSFVKDRRLNGLFSFVDTGALAMEQYPISKLRVEYELAKYQTARVCAFEQTLELEESLLTRYPHLPDENFRKMLESWSDPLLDKWPDLHRKVRLLIAVRNAFSHNQYPMYDEAVFSSIRKYDPSSPDAIEERMGLNIAHRLSEEVKQAKEMAERIIQA

SEQ ID NO: 279 - protein, 1175 aa, Porphyromonas gingivalis
MTEQNEKPYNGTYYTLEDKHFWAAFFNLARHNAYITLTHIDRQLAYSKADITNDEDILFFKGQWKNLDNDLERKARLRSLILKHFSFLEGAAYGKKLFESQSSGNKSSKKKELTKKEKEELQANALSLDNLKSILFDFLQKLKDFRNYYSHYRHPESSELPLFDGNMLQRLYNVFDVSVQRVKRDHEHNDKVDPHRHFNHLVRKGKKDRCGNNDNPFFKHHFVDREEKVTEAGLLFFVSLFLEKRDAIWMQKKIRGFKGGTETYQQMTNEVFCRSRISLPKLKLESLRTDDWMLLDMLNELVRCPKSLYDRLREEDRARFRVPVDILSDEDDTDGTEEDPFKNTLVRHQDRFPYFALRYFDLKKVFTSLRFHIDLGTYHFAIYKKNIGEQPEDRHLTRNLYGFGRIQDFAEEHRPEEWKRLVRDLDYFETGDKPYITQTTPHYHIEKGKIGLRFVPEGQLLWPSPEVGATRTGRSKYAQDKRFTAEAFLSVHELMPMMFYYFLLREKYSEEASAERVQGRIKRVIEDVYAVYDAFARGEIDTLDRLDACLADKGIRRGHLPRQMIAILSQEHKDMEEKVRKKLQEMIADTDHRLDMLDRQTDRKIRIGRKNAGLPKSGVIADWLVRDMMRFQPVAKDTSGKPLNNSKANSTEYRMLQRALALFGGEKERLTPYFRQMNLTGGNNPHPFLHETRWESHTNILSFYRSYLKARKAFLQSIGRSDRVENHRFLLLKEPKTDRQTLVAGWKGEFHLPRGIFTEAVRDCLIEMGLDEVGSYKEVGFMAKAVPLYFERACKDRVQPFYDYPFNVGNSLKPKKGRFLSKEKRAEEWESGKERFRDLEAWSHSAARRIEDAFAGIENASRENKKKIEQLLQDLSLWETFESKLKVKADKINIAKLKKEILEAKEHPYLDFKSWQKFERELRLVKNQDIITWMMCRDLMEENKVEGLDTGTLYLKDIRTDVHEQGSLNVLNRVKPMRLPVVVYRADSRGHVHKEQAPLATVYIEERDTKLLKQGNFKSFVKDRRLNGLFSFVDTGALAMEQYPISKLRVEYELAKYQTARVCAFEQTLELEESLLTRYPHLPDKNFRKMLESWSDPLLDKWPDLHGNVRLLIAVRNAFSHNQYPMYDETLFSSIRKYDPSSPDAIEERMGLNIAHRLSEEVKQAKEMVERIIQA

SEQ ID NO: 280 - protein, 1175 aa, Porphyromonas gingivalis
MTEQNEKPYNGTYYTLEDKHFWAAFFNLARHNAYITLAHIDRQLAYSKADITNDEDILFFKGQWKNLDNDLERKARLRSLILKHFSFLEGAAYGKKLFESQSSGNKSSKKKELTKKEKEELQANALSLDNLKSILFDFLQKLKDFRNYYSHYRHPESSELPLFDGNMLQRLYNVFDVSVQRVKRDHEHNDKVDPHRHFNHLVRKGKKDKYGNNDNPFFKHHFVDREEKVTEAGLLFFVSLFLEKRDAIWMQKKIRGFKGGTEAYQQMTNEVFCRSRISLPKLKLESLRTDDWMLLDMLNELVRCPKSLYDRLREEDRARFRVPVDILSDEDDTDGTEEDPFKNTLVRHQDRFPYFALRYFDLKKVFTSLRFHIDLGTYHFAIYKKNIGEQPEDRHLTRNLYGFGRIQDFAEEHRPEEWKRLVRDLDYFETGDKPYITQTTPHYHIEKGKIGLRFVPEGQLLWPSPEVGATRTGRSKYAQDKRFTAEAFLSVHELMPMMFYYFLLREKYSEEASAEKVQGRIKRVIEDVYAVYDAFARDEINTRDELDACLADKGIRRGHLPRQMIAILSQEHKDMEEKVRKKLQEMIADTDHRLDMLDRQTDRKIRIGRKNAGLPKSGVIADWLVRDMMRFQPVAKDTSGKPLNNSKANSTEYRMLQRALALFGGEKERLTPYFRQMNLTGGNNPHPFLHETRWESHTNILSFYRSYLKARKAFLQSIGRSDREENHRFLLLKEPKTDRQTLVAGWKSEFHLPRGIFTEAVRDCLIEMGYDEVGSYKEVGFMAKAVPLYFERACKDRVQPFYDYPFNVGNSLKPKKGRFLSKEKRAEEWESGKERFRDLEAWSHSAARRIEDAFVGIEYASWENKKKIEQLLQDLSLWETFESKLKVKADKINIAKLKKEILEAKEHPYHDFKSWQKFERELRLVKNQDIITWMMCRDLMEENKVEGLDTGTLYLKDIRTDVQEQGSLNVLNHVKPMRLPVVVYRADSRGHVHKEEAPLATVYIEERDTKLLKQGNFKSFVKDRRLNGLFSFVDTGALAMEQYPISKLRVEYELAKYQTARVCAFEQTLELEESLLTRYPHLPDESFREMLESWSDPLLDKWPDLQREVRLLIAVRNAFSHNQYPMYDETIFSSIRKYDPSSLDAIEERMGLNIAHRLSEEVKLAKEMVERIIQA

SEQ ID NO: 281 - protein, 1175 aa, Porphyromonas gingivalis
MTEQNEKPYNGTYYTLEDKHFWAAFFNLARHNAYITLAHIDRQLAYSKADITNDEDILFFKGQWKNLDNDLERKARLRSLILKHFSFLEGAAYGKKLFESQSSGNKSSKKKELTKKEKEELQANALSLDNLKSILFDFLQKLKDFRNYYSHYRHPESSELPLFDGNMLQRLYNVFDVSVQRVKRDHEHNDKVDPHRHFNHLVRKGKKDKYGNNDNPFFKHHFVDREEKVTEAGLLFFVSLFLEKRDAIWMQKKIRGFKGGTEAYQQMTNEVFCRSRISLPKLKLESLRTDDWMLLDMLNELVRCPKLLYDRLREEDRARFRVPVDILSDEDDTDGTEEDPFKNTLVRHQDRFPYFALRYFDLKKVFTSLRFHIDLGTYHFAIYKKNIGEQPEDRHLTRNLYGFGRIQDFAEEHRPEEWKRLVRDLDYFETGDKPYITQTTPHYHIEKGKIGLRFVPEGQLLWPSPEVGATRTGRSKYAQDKRFTAEAFLSVHELMPMMFYYFLLREKYSEEASAEKVQGRIKRVIEDVYAVYDAFARDEINTRDELDACLADKGIRRGHLPRQMIAILSQEHKDMEEKVRKKLQEMIADTDHRLDMLDRQTDRKIRIGRKNAGLPKSGVIADWLVRDMMRFQPVAKDTSGKPLNNSKANSTEYRMLQRALALFGGEKERLTPYFRQMNLTGGNNPHPFLHETRWESHTNILSFYRSYLKARKAFLQSIGRSDREENHRFLLLKEPKTDRQTLVAGWKSEFHLPRGIFTEAVRDCLIEMGYDEVGSYKEVGFMAKAVPLYFERACKDRVQPFYDYPFNVGNSLKPKKGRFLSKEKRAEEWESGKERFRDLEAWSHSAARRIEDAFVGIEYASWENKKKIEQLLQDLSLWETFESKLKVKADKINIAKLKKEILEAKEHPYHDFKSWQKFERELRLVKNQDIITWMMCRDLMEENKVEGLDTGTLYLKDIRTDVQEQGSLNVLNHVKPMRLPVVVYRADSRGHVHKEEAPLATVYIEERDTKLLKQGNFKSFVKDRRLNGLFSFVDTGALAMEQYPISKLRVEYELAKYQTARVCAFEQTLELEESLLTRYPHLPDESFREMLESWSDPLLDKWPDLQREVRLLIAVRNAFSHNQYPMYDETIFSSIRKYDPSSLDAIEERMGLNIAHRLSEEVKLAKEMVERIIQA

SEQ ID NO: 282 - protein, 1119 aa, Porphyromonas gingivalis
MTEQNEKPYNGTYYTLEDKHFWAAFLNLARHNAYITLAHIDRQLAYSKADITNDEDILFFKGQWKNLDNDLERKARLRSLILKHFSFLEGAAYGKKLFESQSSGNKSSKKKELSKKEKEELQANALSLDNLKSILFDFLQKLKDFRNYYSHYRHPESSELPLFDGNMLQRLYNVFDVSVQRVKRDHEHNDKVDPHRHFNHLVRKGKKDKYGNNDNPFFKHHFVDREGTVTEAGLLFFVSLFLEKRDAIWMQKKIRGFKGGTEAYQQMTNEVFCRSRISLPKLKLESLRTDDWMLLDMLNELVRCPKSLYDRLREEDRARFRVPVDILSDEDDTDGTEEDPFKNTLVRHQDRFPYFALRYFDLKKVFTSLRFHIDLGTYHFAIYKKNIGEQPEDRHLTRNLYGFGRIQDFAEEHRPEEWKRLVRDLDYFETGDKPYITQTTPHYHIEKGKIGLRFVPEGQHLWPSPEVGATRTGRSKYAQDKRLTAEAFLSVHELMPMMFYYFLLREKYSEEVSAEKVQGRIKRVIEDVYAVYDAFARDEINTRDELDACLADKGIRRGHLPRQMIAILSQEHKDMEEKVRKKLQEMIADTDHRLDMLDRQTDRKIRIGRKNAGLPKSGVVADWLVRDMMRFQPVAKDTSGKPLNNSKANSTEYRMLQRALALFGGEKERLTPYFRQMNLTGGNNPHPFLHETRWESHTNILSFYRSYLEARKAFLQSIGRSDRVENHRFLLLKEPKTDRQTLVAGWKGEFHLPRGIFTEAVRDCLIEMGYDEVGSYKEVGFMAKAVPLYFERASKDRVQPFYDYPFNVGNSLKPKKGRFLSKEKRAEEWESGKERFRLAKLKKEILEAKEHPYHDFKSWQKFERELRLVKNQDIITWMMCRDLMEENKVEGLDTGTLYLKDIRTDVQEQGSLNVLNRVKPMRLPVVVYRADSRGHVHKEQAPLATVYIEERDTKLLKQGNFKSFVKDRRLNGLFSFVDTGALAMEQYPISKLRVEYELAKYQTARVCAFEQTLELEESLLTRYPHLPDKNFRKMLESWSDPLLDKWPDLHGNVRLLIAVRNAFSHNQYPMYDETLFSSIRKYDPSSPDAIEERMGLNIAHRLSEEVKQAKEMVERIIQA

SEQ ID NO: 283 - protein, 1119 aa, Porphyromonas gingivalis
MTEQNERPYNGTYYTLEDKHFWAAFFNLARHNAYITLAHIDRQLAYSKADITNDEDILFFKGQWKNLDNDLERKARLRSLILKHFSFLEGAAYGKKLFESQSSGNKSSKKKELTKKEKEELQANALSLDNLKSILFDFLQKLKDFRNYYSHYRHPESSELPLFDGNMLQRLYNVFDVSVQRVKRDHEHNDKVDPHRHFNHLVRKGKKDRYGNNDNPFFKHHFVDREGTVTEAGLLFFVSLFLEKRDAIWMQKKIRGFKGGTEAYQQMTNEVFCRSRISLPKLKLESLRTDDWMLLDMLNELVRCPKSLYDRLREEDRARFRVPIDILSDEDDTDGTEEDPFKNTLVRHQDRFPYFALRYFDLKKVFTSLRFHIDLGTYHFAIYKKNIGEQPEDRHLTRNLYGFGRIQDFAEEHRPEEWKRLVRDLDYFETGDKPYITQTTPHYHIEKGKIGLRFVPEGQHLWPSPEVGATRTGRSKYAQDKRLTAEAFLSVHELMPMMFYYFLLREKYSEEVSAEKVQGRIKRVIEDVYAVYDAFARGEIDTLDRLDACLADKGIRRGHLPRQMIAILSQEHKDMEEKVRKKLQEMIADTDHRLDMLDRQTDRKIRIGRKNAGLPKSGVIADWLVRDMMRFQPVAKDTSGKPLNNSKANSTEYRMLQRALALFGGEKERLTPYFRQMNLTGGNNPHPFLHETRWESHTNILSFYRSYLKARKAFLQSIGRSDREENHRFLLLKEPKTDRQTLVAGWKSEFHLPRGIFTEAVRDCLIEMGYDEVGSYKEVGFMAKAVPLYFERACKDRVQPFYDYPFNVGNSLKPKKGRFLSKEKRAEEWESGKERFRLAKLKKEILEAKEHPYLDFKSWQKFERELRLVKNQDIITWMMCRDLMEENKVEGLDTGTLYLKDIRTDVHEQGSLNVLNRVKPMRLPVVVYRADSRGHVHKEQAPLATVYIEERDTKLLKQGNFKSFVKDRRLNGLFSFVDTGALAMEQYPISKLRVEYELAKYQTARVCAFEQTLELEESLLTRYPHLPDKNFRKMLESWSDPLLDKWPDLHRKVRLLIAVRNAFSHNQYPMYDEAVFSSIRKYDPSSPDAIEERMGLNIAHRLSEEVKQAKEMAERIIQV

SEQ ID NO: 284 - protein, 1119 aa, Porphyromonas gingivalis
MTEQNERPYNGTYYTLEDKHFWAAFFNLARHNAYITLTHIDRQLAYSKADITNDEDILFFKGQWKNLDNDLERKARLRSLILKHFSFLEGAAYGKKLFENKSSGNKSSKKKELTKKEKEELQANALSLDNLKSILFDFLQKLKDFRNYYSHYRHPESSELPLFDGNMLQRLYNVFDVSVQRVKRDHEHNDKVDPHRHFNHLVRKGKKDRCGNNDNPFFKHHFVDREGKVTEAGLLFFVSLFLEKRDAIWMQKKIRGFKGGTEAYQQMTNEVFCRSRISLPKLKLESLRTDDWMLLDMLNELVRCPKSLYDRLREEDRARFRVPVDILSDEDDTDGTEEDPFKNTLVRHQDRFPYFALRYFDLKKVFTSLRFHIDLGTYHFAIYKKNIGEQPEDRHLTRNLYGFGRIQDFAEEHRPEEWKRLVRDLDYFETGDKPYITQTTPHYHIEKGKIGLRFVPEGQHLWPSPEVGATRTGRSKYAQDKRLTAEAFLSVHELMPMMFYYFLLREKYSEEVSAEKVQGRIKRVIEDVYAVYDAFARGEIDTLDRLDACLADKGIRRGHLPRQMIAILSQEHKDMEEKVRKKLQEMIADTDHRLDMLDRQTDRKIRIGRKNAGLPKSGVIADWLVRDMMRFQPVAKDTSGKPLNNSKANSTEYRMLQRALALFGGEKERLTPYFRQMNLTGGNNPHPFLHETRWESHTNILSFYRSYLKARKAFLQSIGRSDREENHRFLLLKEPKTDRQTLVAGWKSEFHLPRGIFTEAVRDCLIEMGYDEVGSYKEVGFMAKAVPLYFERACKDRVQPFYDYPFNVGNSLKPKKGRFLSKEKRAEEWESGKERFRLAKLKKEILEAKEHPYLDFKSWQKFERELRLVKNQDIITWMMCRDLMEENKVEGLDTGTLYLKDIRTEVQEQGSLNVLNRVKPMRLPVVVYRADSRGHVHKEQAPLATVYIEERDTKLLKQGNFKSFVKDRRLNGLFSFVDTGGLAMEQYPISKLRVEYELAKYQTARVCAFEQTLELEESLLTRCPHLPDKNFRKMLESWSDPLLDKWPDLQREVWLLIAVRNAFSHNQYPMYDEAVFSSIRKYDPSSPDAIEERMGLNIAHRLSEEVKQAKEMAERIIQA

SEQ ID NO: 285 - DNA, 1591 bp, Homo sapiens
tgtgtgtcgaagaaacctgactgcgccctgaggagaacagcggagaaggtccaccgagcctggcgaaaggtccgctgagcgggctgtcgtccggagccactccgggctgcggagcacccagtggagaccgcgcctggctcaggtgtgggaccccatccttcctgtcttcgcagaggagtcctcgcgtgaaataagcgggttttgaaaacaaaaaaaagaaggagtggaagagggggccaggatccaggcctccatccccacagaagtgaagctacagctgggaggtctcctcccaccccaaccgtcaccctgggtcccgactgcccacctcctcctcctccccctccccccaacaacaacaacaacaacaactccaagcacaccggccataagagtgcgtgtgtccccaacatgaccgaacgaagaagggacgagctctctgaagagatcaacaacttaagagagaaggtcatgaagcagtcggaggagaacaacaacctgcagagccaggtgcagaagctcacagaggagaacaccacccttcgagagcaagtggaacccacccctgaggatgaggatgatgacatcgagctccgcggtgctgcagcagctgctgccccaccccctccaatagaggaagagtgcccagaagacctcccagagaagttcgatggcaacccagacatgctggctcctttcatggcccagtgccagatcttcatggaaaagagcaccagggatttctcagttgatcgtgtccgtgtctgcttcgtgacaagcatgatgaccggccgtgctgcccgttgggcctcagcaaagctggagcgctcccactacctgatgcacaactacccagctttcatgatggaaatgaagcatgtctttgaagaccctcagaggcgagaggttgccaaacgcaagatcagacgcctgcgccaaggcatggggtctgtcatcgactactccaatgctttccagatgattgcccaggacctggattggaacgagcctgcgctgattgaccagtaccacgagggcctcagcgaccacattcaggaggagctctcccacctcgaggtcgccaagtcgctgtctgctctgattgggcagtgcattcacattgagagaaggctggccagggctgctgcagctcgcaagccacgctcgccaccccgggcgctggtgttgcctcacattgcaagccaccaccaggtagatccaaccgagccggtgggaggtgcccgcatgcgcctgacgcaggaagaaaaagaaagacgcagaaagctgaacctgtgcctctactgtggaacaggaggtcactacgctgacaattgtcctgccaaggcctcaaagtcttcgccggcgggaaactccccggccccgctgtagagggaccttcagcgaccgaaccagcttaggcaaaagagtccccacaagatgaaaataaagatcctagttaccattcaaaggaaaaaaaaaaaaaaaaaaaaaaaaaaaaaaaaaaaaaaaaaaaaaaaaaaaaaaaaaaaaaaaaaaaaaaaaaaaaaaaaaaaaaaaaaaaaaaaaaaaaaaaaaaaaaaaaaaaaaaaaa

SEQ ID NO: 286 - protein, 124 aa, Unknown
  Description of Unknown: Gut metagenome contig sequence
LYLTSFGKGNAAVIEQKIEPENGYRVTGMQITPSITVNKATDESVRFRVKRKIAQKDEFIADNPMHEGRHRIEPSAGSDMLGLKTKLEKYYFGKEFDDNLHIQIIYNILDIEKILAVYSTNITA

SEQ ID NO: 287 - protein, 358 aa, Unknown
  Description of Unknown: Gut metagenome contig sequence
MDSYRPKLYKLIDFCIFKHYHEYTEISEKNVDTLRAAVSEEQKESFYADEAKRLWGIFDKQFLGFCKKINVWVNGSHEKEILGYIDKDAYRKKSDVSYFSKFLYAMSFFLDGKEINDLLTTLINKFDNIASFISTAKELDAEIDRILEKKLDPVTGKPLKGKNSFRNFIANNVIENKRFIYVIKFCNPKNVLKLVKNTKVTEFVLKRMPESQIDRYYSSCIDTEKNPSVDKKISDLAEMIKKIAFDDFRNVRQKTRTREESLEKERFKAVIGLYLTVVYLLIKNLVNVNSRYVMAFHCLERDAKLYGINIGKNYIELTEDLCRENENSRSAYLARNKRLRDCVKQNIDNAKNMKSKEK

SEQ ID NO: 288 - protein, 149 aa, Unknown
  Description of Unknown: Gut metagenome contig sequence
DTKINPQTWLYQLENTPDLDNEYRDTLDHFFDERFNEINEHFVTQNATNLCIMKEVFPDEDFKSIADLYYDFIVVKSYKNIGFSIKKLREKMLELPEAKRVTSTEMDSVRSKLYKLIDFCIFKHYHEKPETVEMIVSMLRAYTSEDMKE

SEQ ID NO: 289 - protein, 320 aa, Unknown
  Description of Unknown: Gut metagenome contig sequence
KEGSTMAKNEKKKSTAKALGLKSSFVVNNDIYMTSFGKGNKAVLEKKITENTIENKSDTTYFDVINRDPKGFTLEGRRIADMTAFSNDPKYHVNVVNGKFLEDQLGARSELEKKVFGRTFDDNVHIQLIHNILDIEKIMAQYVSDIVYLLHNTIKRDMNDDIMGYISIRNSFDDFCHPERIPDRKAKDNLQKQHDIFFDEILKCGRLAYFGNAFFEDGSDNKEIAKLKRYKEIYHIIALMGSLRQSYFHGENSDKNFQGPTWAYTLESNLTGKYKEFKDTLDKTFDERYEMISKDFGSTNMVNLQILEELLKMLYGNVSP

SEQ ID NO: 290 - protein, 204 aa, Unknown
  Description of Unknown: Gut metagenome contig sequence
EKQNKAKYQAIISLYLMVMYQIVKNMIYVNSRYVIAFHCLERDSNQLLGRFNSRDASMYNKLTQKFITDKYLNDGAQGCSKKVGNYLSHNITCCSDELRKEYRNQVDHFAVVRMIGKYAADIGKFSTWFELYHYVMQRIIFDKRNPLSETERTYKQLIAKHHTYCKDLVKALNTPFGYNLARYKNLSIGELFDRNNYNAKTKET

SEQ ID NO: 291 - protein, 449 aa, Unknown
  Description of Unknown: Gut metagenome contig sequence
LIDFLIYDLYYNRKPARIEEIVDKLRESVNDEEKESIYSAETKYVYEALGKVLVRSLKKYLNGATIRDLKNRYDAKTANRIWDISEHSKSGHVNCFCKLIYMMTLMLDGKEINDLLTTLVNKFDNIASFIDVMDELGLEHSFTDNYKMFADSKAICLDLQFINSFARMSKIDDEKSKRQLFRDALVVLDIGDKNEDWIEKYLTSDIFKRDENGNKIDGEKRDFRNFIANNVIKSARFKYLVKYSSADGMIKLKKNEKLISFVLEQLPETQIDRYYESCGLDCAVADRKVRIEKLTGLIRDMRFDNFRGVNYSNDACKKDKQAKAKYQAIISLYLMVLYQIVKNMIYVNSRYVIAFHCLERDLLFFNIELDNSYQYSNCNELTEKFIKDKYMKEGALGFNMKAGRYLTKNIGNCSNELRKIYRNQVDHFAVVRKIGNYAADIASVGSWFE

SEQ ID NO: 292 - protein, 96 aa, Unknown
  Description of Unknown: Gut metagenome contig sequence
YMDQNFANSDAWAIHVYRNKIQHLDAVRHADMYIGDIREFHSWFELYHYIIQRRIIDQYAYESTPGSSRDGSAIIDEERLNPATRRYFRLITTYKT

SEQ ID NO: 293 - protein, 519 aa, Unknown
  Description of Unknown: Gut metagenome contig sequence
RYDKDRSKIYTMMDFVIYRYYIDNNNDSIDFINKLRSSIDEKSKEKLYNEEANRLWNKLKEYMLYIKEFNGKLASRTPDRDGNISEFVESLPKIHRLLPRGQKISNFSKLMYLLTMFLDGKEINDLLTTLINKFENIQGFLDIMPEINVNAKFEPEYVFFNKSHEIAGELKLIKGFAQMGEPAATLKLEMTADAIKILGTEKEDAELIKLAESLFKDENGKLLGNKQHGMRNFIGNNVIKSKRFHYLIRYGDPAHLHKIATNKNVVRFVLGRIADMQKKQGQKGKNQIDRYYEVCVGNKDIKKTIEEKIDALTDIIVNMNYDQFEKKKAVIENQNRGKTFEEKNKYKRDNAEREKFKKIISLYLTVIYHILKNIVNVNSRYILGFHCLERDKQLYIEKYNKDKLDGFVALTKFCLGDEERYEDLKAKAQASIQALETANPKLYAKYMNYSDEEKKEEFKKQLNRERVKNARNAYLKNIKNYIMIRLQLRDQTDSSGYLCGEFRDKVAHLEVARHAHEYI

SEQ ID NO: 294 - protein, 181 aa, Unknown
  Description of Unknown: Gut metagenome contig sequence
NGEIVSLAEKEAFSAKIADKNIGCKIENKQFRHPKGYDVIADNPIYKGSPRQDMLGLKETLEKRYFSPSDSIDNVRVQVAHNILDIEKILAEYITNAVYSFDNIAGFGKDIIGDDFSPVYTYDKFEKSDRYEYFKNLLNNSRLGYYGQAFFECDDSKENKKKKDAIKCYNIIALLSGLRHW

SEQ ID NO: 295 - protein, 440 aa, Unknown
  Description of Unknown: Gut metagenome contig sequence
MSKNKESYAKGMGLKSALVSGSKVYMTSFEGGNDAKLEKVVENSEIVSLAEKESFSAEIFKKNIGCKIENKKFKHPKRYDVIADNPLYKGSVRQDMLGLKETLEKRYFNSADGTDNVCIQVIHNILDIEKILAEYITNAVYSFDNIAGFGEDIIGMGGFKPIYTYKQFKEPDKYNKKFDDILNNSRLGYYGKAFFEKNDLKHNPNKKKRDKNPYILKYDNECYYIIALLSGLRHWNIHSHAKDDLVSYRWLYNLDSILNREYISTLNYLYDDIADELTESFSKNSSANVNYIAETLNIDPSEFAQQYFRFSIMKEQKNMGFNVSKLREIMLDRKELSDIRDNHRVFDSIRSKLYTMMDFVIYRYYIEEAAKTEAENRNLPENEKKISEKDFFVINLRGSFDENQKEKLYIEEAKRLWEKLKDIMLKIKEFRGEKVKEYKK

SEQ ID NO: 296 - protein, 137 aa, Unknown
  Description of Unknown: Gut metagenome contig sequence
LDKQLDYEYIRTLNYMFNDIADELTRTFSKNSAANVNYIAETLNIDPNKFAEQYFRFSIMKEQKNLGFNLTKLRESMLDRRELSDIRDNHNVFDSIRPKLYTMMDFVIYKHYIDEAKKTEAENKSLPDDRKNLSEKD

SEQ ID NO: 297 - protein, 87 aa, Unknown
  Description of Unknown: Gut metagenome contig sequence
RMGEPVANTKRVMMIDAVKILGTDLSDDELKEMADSFFKDSDGNLLKKGKHGMRNFITNNVIKNKRFHYLIRYGDPAHLHEIAKNEA

SEQ ID NO: 298 - protein, 414 aa, Unknown
  Description of Unknown: Gut metagenome contig sequence
VHNNEEKDLIKYTWLYNLDKYLDAEYITTLNYMYNDIGDELTDSFSKNSAANINYIAETLGIDPKTFAEQYFRFSIMKEQKNLGFNLTKLREVMLDRKDMSEIRENHNDFDSIRAKVYTMMDFVIYRYYIEEAAKVNAANKSLPDNEKSLSEKDIFVISLRGSFNEDQKDRLYYDEAQRLWSKVGKLMLKIKKFRGKDTRKYKNMGTPRIRRLIPEGRDISTFSKLMYALTMFLDGKEINDLLTTLINKFDNIQSFLKVMPLIGVNAKFAEEYSFFNNSEKIADELRLIKSFARMGEPVADARRAMYIDAIRILGTDLSDDELKALADSFSLDENGNKLGKGKHGMRNFIINNVITNKRFHYLIRYGNPVHLHEIAKNEAVVKFVLGRIADIQKKQGQNGKNQIDRYYETCIGK

SEQ ID NO: 299 - protein, 345 aa, Unknown
  Description of Unknown: Gut metagenome contig sequence
MSKKENRKSYVKGLGLKSTLVSDSKVYLTTFADGSNAKLEKCVENNKIICISNDKEAFAASIANKNVGYKIKNDEKFRHPKGYDIISNNPLLHNNSVQQDMLGLKNVLEKRYFGKSSGGDNNLCIQIIHNIIDIEKILSEYIPNVVYAFNNIAGFKDEHNNIIDIIGTQTYNSSYTYADFSKDKSDKKYIEFQKLLKNKRLGYWGKAFFTGQGNNAKVRQENQCFHIIALLISLRNWATHSNELDKHTKRTWLYKLDDTNILNAEYVKTLNYLYDTIADELTKSFSKNGAVNVNYLAKKYNIKDDLPGFSEQYFRFSIMKEQKNLGFNISKLRENMLDFKDMSVI

SEQ ID NO: 300 - protein, 206 aa, Unknown
  Description of Unknown: Gut metagenome contig sequence
KKISSLTKFCLGESDEKKLKALAKKSLEELKTTNSKLYENYIKYSDERKAEEAKRQINRERAKTAMNAHLRNTKWNDIMYGQLKDLADSKSRICSEFRNKAAHLEVARYAHMYINDISEVKSYFRLYHYIMQRRIIDVIENNPKAKYEGKVKVYFEDVKKNKKYNKNLLKLMCVPFGYCIPRFKNLSIEQMFDMNETDNSDKKKEK

SEQ ID NO: 301 - protein, 95 aa, Unknown
  Description of Unknown: Gut metagenome contig sequence
IGDISEVNSYFQLYHYIMQRILIDKIGSKTTGKAKEYFDSVIVNKKYDDRLLKLLCSPLGYCLTRYKDLSIEALFDMNEAAKYDKLNKERKNKKK

SEQ ID NO: 302 - protein, 115 aa, Unknown
  Description of Unknown: Gut metagenome contig sequence
SIRSKLYTMMDFVIYRYYIEESAKAAAENKPSESDSFVIRLRGSFNENQKEELYIEEAERLWKKFGEIMLKIKEFRGEKVKEYKKEVPRIERILPHGKDISAFSKLMYMLSMFLD

SEQ ID NO: 303 - protein, 234 aa, Unknown
  Description of Unknown: Gut metagenome contig sequence
MYFSKMIYMLTYFLDGKEINDLLTTLISKFDNIKEFLKIMKSSAVDVECELTAGYKLFNDSQRITNELFIVKNIASMRKPAASAKLTMFRDALTILGIDDKITDDRISEILKLKEKGKGIHGLRNFITNNVIESSRFVYLIKYANAQKIREVAKNEKVVMFVLGGIPDTQIERYYKSCVEFPDMNSSLEAKRSELARMIKNISFDDFKNVKQQAKGRENVAKERAKAVIGLYLT

SEQ ID NO: 304 - protein, 939 aa, Unknown
  Description of Unknown: Human gut metagenome sequence
MAKKKRITAKERKQNHRELLMKKADSNAEKEKAKKPVVENKPDTAISKDNTPKPNKEIKKSKAKLAGVKWVIKANDDVAYISSFGKGNNSVLEKRIMGDVSSNVNKDSHMYVNPKYTKKNYEIKNGFSSGSSLVTYPNKPDKNSGMDALCLKPYFEKDFFGHIFTDNMHIQAIYNIFDIEKILAKHITNIIYTVNSFDRNYNQSGNDTIGFGLNYRVPYSEYGGGKDSNGEPKNQSKWEKRDNFIKFYNESKPHLGYYENIFYDHGEPISEEKFYNYLNILNFIRNNTFHYKDDDIELYSENYSEEFVFINCLNKFVKNKFKNVNKNFISNEKNNLYIILNAYGKDTENVEVVKKYSKELYKLSVLKTNKNLGVNVKKLRESAIEYGYCPLPYDKEKEVAKLSSVKHKLYKTYDFVITHYLNSNDKLLLEIVETLRLSKNDDEKENVYKKYAEKLFKADDVINPIKAISKLFARKGNKLFKEKIIIKKEYIEDVSIDKNIYDFTKVIFFMTCFLDGKEINDLLTNIISKLQVIEDHNNVIKFISNNKDAVYKDYSDKYAIFRNAGKIATELEAIKSIARMENKIENAPQEPLLKDALLSLGVSDDTKVLENTYNKYFDSKEKTDKQSQKVSTFLMNNVINNNRFKYVIKYINPADINGLAKNRYLVKFVLSKIPEEQIDSYYKLFSNEEEPGCEEKIKLLTKKISKLNFQTLFENNKIPNVEKEKKKAIITLYFTIVYILVKNLVNINGLYTLALYFVERDGYFYKDICGKKDKKKSYNDVDYLLLPEIFSGSKYREETKNLKLPKEKDRDIMKKYLPNDKDREKYNKFFTAYRNNIVHLNIIAKLSELTKNIDKDINSYFDIYHYCTQRVMFNYCKEKNDVVLAKMKDLAHIKSDCNEFSSKHTYPFSSAVLRFMNLPFAYNVPRFKNLSYKKFFDKQ

SEQ ID NO: 305 - protein, 984 aa, Unknown
  Description of Unknown: Human gut metagenome sequence
MKKKNIRATREALKAQKIKKSQENEALKKQKLAEEAAQKRREELEKKNLAQWEETSAEGRRSRVKAVGVKSVFVVGDDLYLATFGNGNETVLEKKITPDGKITTFPEEETFTAKLKFAQTEPTVATSIGISNGRIVLPEISVDNPLHTTMQKNTIKRSAGEDILQLKDVLENRYFDRSFNDDLHIRLIYNILDIEKILAEYTTNAVFAIDNVSGCSDDFLSNFSTRNQWDEFQNPEQHREHFGNKDNVICSVKKQQDLFFNFFKNNRIGYFGKAFFHAESERKIVKKTEKEVYHILTLIGSLRQWITHSTEGGISRLWLYQLEDALSREYQETMNNCYNSTIYGLQKDFEKTNAPNLNFLAEILGKNASELAEPYFRFIITKEYKNLGFSIKTLREMLLDQPDLQEIRENHNVYDSIRSKLYKMIDFVLVYAYSNERKSKADALASNLRSAITEDAKKRIYQNEADQLWTSYQELFKRIRGFKGAQVKEYSSKNMPIPIQKQIQNILKPAEQVTYFTKLMYLLTMFLDGKEINDLLTTLINKFDNISSLLKTMEQLELQTTFKEDYTFFQQSSRLCKEITQLKSFARMGNPISNLKEVMMVDAIQILGTEKSEQELQSMACFFFRDKNGKKLNTGEHGMRNFIGNNVISNTRFQYLIRYGNPQKLHTLSQNETVVRFVLSRIAKNQRVQGMNGKNQIDRYYETCGGTNSWSVSEEEKINFLCKILTNMSYDQFQDVKQSGAEITAEEKRKKERYKAIISLYLTVLYQLIKNLVNINARYIIAFHCLERDAILYSSKFNTSINLKKRYTALTEMILGYETDEKARRKDTRTVYEKAEAAKNRHLKNVKWNCKTRENLENADKNAIVAFRNIVAHLWIIRDADRFITGMGAMKRYFDCYHYLLQRELGYILEKSNQGSEYTKKSLEKVQQYHSYCKDFLHMLCLPFAYCIPRYKNLSIAELFDRHEPEAEPKEEASSVNNSQFITT

SEQ ID NO: 306 - protein, 978 aa, Unknown
  Description of Unknown: Human gut metagenome sequence
  MOD_RES (1)..(222): Any amino acid
XXXXXXXXXXXXXXXXXXXXXXXXXXXXXXXXXXXXXXXXXXXXXXXXXXXXXXXXXXXXXXXXXXXXXXXXXXXXXXXXXXXXXXXXXXXXXXXXXXXXXXXXXXXXXXXXXXXXXXXXXXXXXXXXXXXXXXXXXXXXXXXXXXXXXXXXXXXXXXXXXXXXXXXXXXXXXXXXXXXXXXXXXXXXXXXXXXXXXXXXXXXXXXXXXXXXXXXXXXXXXXHPLQKRYRYLTSTNLKSFETYKNNLVNKKKFDLDRVKKIPQLAYFGSAFYNTPEDTSAKITKTKIKSNEEIYYTFMLLSTARNFSAHYLDRNRAKSSDAEDFDGTSVIMYNLDNEELYKKLYNKKVHMALTGMKKVLDANFNKKVEHLNNSFIKNSAKDFVILCEVLGIKSRDEKTKFVKDYYDFVVRKNYKHLGFSVKELRELLFANHDSNKYIKEFDKISNKKFDSVRSRLNRLADYIIYDYYNKNNAKVSDLVKYLRAAADDEQKKKIYLNESINLVKSGILERIKKILPKLNGKIIGNMQPDSTITASMLHNTGKDWHPISENAHYFTKWIYTLTLFMDGKEINDLVTTLINKFDNIASFIEVLKSQSVCTHFSEERKMFIDSAEICSELSAMNSFARMEAPGASSKRAMFVEAARILGDNRSKEELEEYFDTLFDKSASKKEKGFRNFIRNNVVDSNRFKYLTRYTDTSSVKAFSNNKALVKFAIKDIPQEQILRYYNSCFGASERYYNDGMSDKLVEAIGKINLMQFNGVIQQADRNMLPEEKKKANAQKEKYKSIIRLYLTVCYLFFKNLVYVNSRYYSAFYNLEKDRSLFEINGELKPTGKFDEGHYTGLVKLFIDNGWINPRASAYLTVNLANSDETAIRTFRNTAEHLEALRNADKYLNDLKQFDSYFEIYHYITQRNIKEKCEMLKEQTVKYNNDLLKYHGYSKDFVKALCVPFGYNLPRFKNLSIDALFDKNDKREKLKKGFED

SEQ ID NO: 307 - protein, 1023 aa, Unknown
  Description of Unknown: Human gut metagenome sequence
MAKKITAKQKREEKERLNKQKWAKNDSVIIVPETKEEIKTGEIQDNNRKRSRQKSQAKAMGLKAVLSFDNKIAIASFVSSKNAKSSHIERITDKEGTTISVNSKMFESSVNKRDINIEKRITIEEPQQDGTIKKEEKGVKSTTCNPYFKVGGKDYIGIKEIAEEHFFGRAFPNENLRVQIAYNIFDVQKILGTFVNNIIYSFYNLSRDEVQSDNDVIGMLYSISDYDRQKETETFLQAKSLLKQTEAYYAYFDDVFKKNKKPDKNKEGDNSKQYQENLRHNFNILRVLSFLRQICMHAEVHVSDDEGCTRTQNYTDSLEALFNISKAFGKKMPELKTLIDNIYSKGINAINDEFVKNGKNNLYILSKVYPNEKREVLLREYYNFVVCKEGSNIGISTRKLKETMIAQNMPSLKEENTYRNKLYTVMNFILVRELKNCATIREQMIKELRANMDEEEGRDRIYSKYAKEIYLYVKDKLKLMLNVFKEEAEGIIIPGKEDPVKFSHGKLDKKEIESFCLTTKNTEDITKVIYFLCKFLDGKEINELCCAMMNKLDGISDLIETAKQCGEDVEFVDQFKCLSKCATMSNQIRIVKNISRMKKEMTIDNDTIFLDALELLGRKIEKYQKDKNGDYVKDEKGKKVYTKDYNNFQDMFFEGKNHRVRNFVSNNVIKSKWFSYVVRYNKPAECQALMRNSKLVKFALDELPDSQIEKYYISVFGEKSSSSNEEMRRELLKKLCDFSVRGFLDEIVLLSEDEMKQKDKFSEKEKKKSLIRLYLTIVYLITKSMVKINTRFSIACATYERDYILLCQSEKAERAWEKGATAFALTRKFLNHDKPTFEQYYTREREISAMPQEKRKELRKENDQLLKKTHYSKHAYCYIVDNVNNLTGAVANDNGRGLPCLSEKNDNANLFLEMRNKIVHLNVVHDMVKYINEIKNITSYYAFFCYVLQRMIIGNNSNEQNKFKAKYSKTLQEFGTYSKDLMWVLNLPFAYNLPRYKNLSNEQLFYDEEERMEKIVGRKNDSR

SEQ ID NO: 308 - protein, 926 aa, Unknown
  Description of Unknown: Human gut metagenome sequence
MTETKPKREDIAKTPAAKSRSKAAGLKSTFAVNGSVLLTSFGRGNDAVPEKLITEKAVSEINTVKPRFSVEKPATSYSSSFGIKSHISATADNPLAGRAPVGEDAIHAKEVLEQRVFGKTFSDDNIHIQLIYNILDIRKILSTYANNVVFTINSMRRLDEYDREQDYLGYLYTGNSYERLLDIADKYAVDGEDWRNTAAGISNDFEKKQFQTINGFWDLLDMIEPYMCYFSEAFFCETTVKDPDSGRIVPCLEQRSDGDIYNILRILSIVRQTCMHDNASMRTVMFTLGQNSVRDRKNGFDELAELLDYLYDEKIDIVNRDFLRNQKNNIELLSRIYGSSADSPERDRLVQNFYDFRVLSQDKNLGFSIKKLREKLLDSPALSVVRSKKYDTMRSKIYSLIDFMIYRKFSENHVAVDDFVEELRSLLTEDEKESAYSRWAETLINDGFAQEILVKLLPQTDPAVIGKIKGKKLLNDSIAGIKLKKDASFFTKIINVLCMFQDGKEINELVSSLVNKFANIQSFVDVMRSQGIDSGFTADYAMFAESGRISRELHILKGIARMQHSIAGLGDVKIYGSDDKFHGVSRRVYTDAAYILGFGERSEDNDGYVDDYVSSKLLGGADKNLRNFITNNVIKNRRFLYTVRYMNPKRAKKLVQNDALVVLALSGIPETQIDRYYKSCIEKRSFNPDLNEKIAALSEMITTLKIDDFEDVKQNPEKNANYEAKKNQRISKERYKACIGLYLTVLYLICKNLVKINARYSIAIGCLERDTQLHGVDFKGAAYMTRDVFIAKGWINPKKPTVKSIKEQYAFLTPYIFTTYRNMIAHLAAVTNAYKYIPQMDRFKSWFHLYHTVIQHSLIQQYEYDRDYGRKGAPVVSERVLQLLEQCREHSNYSRDLLHILNLPFGYNLPRYLNLSSEKYFDANAI

SEQ ID NO: 309 - protein, 1030 aa, Unknown
  Description of Unknown: Human gut metagenome sequence
MAKKITAKQKREEKERLNKQKWAKQDTPVVPKSKTEEKPVAASDDKLLKTTQVKKVQTKSKAKAMGLKTVLSFDDKIAIASFVNDKKTKLPHIERITDKSGTTIHENARMFDSSVDEQNVNIEKRMTIEEKQNDGTFKKDEKDVKATICNPYFKTCGKDYIGIKDVAEKYFFGKTFPNENLRVQIAYNVFDIQKILGTYVNNIIYSFYNLRRDGKSDVDIIGSLYAFADFDNQLKDKPAFREAKDLLKNTEAYFSYFGDVFKKSKKGKKDENNEDYEKNLRHNFNVLRVLSFLRQICTHAYVKCTGGAKNNGDSTKVEAESLDALFNITEYFAKTAPELSKTINEIYKEGIDRINNDFVTNGKNNLYILSKVYPDMQRNELVKKYYQFVVCKEGNNVGINTRKLKESIISQHPWITTPQDNNKANDYESCRHKLYTIMCFILVAELDAHESIRDNMVAELRANMDGDDGRDAIYEKYAKDIYHIVKDKLLAMQKVFDEELVPVKVEGKNDPQQFTHGKLGKKEIESFCLSDKNTSDIAKVVYFLCNFLDGKEINELCCAMMNKFDGIGDLIDTAKQCGEEVKFIEEFACLSNCRKITNDIRVAKSISKMKNKVNIDNDIIYLDAIELLGRKIEKYQKDENGKILLGTDGKRLYTQEYKYFNDMFFNAGNHKVRNFIANNVMQSKWFFYVVRYNKPAECQIIMRNKTLVKFTLDDLPDMQIQRYYSSVFGDNNMPAVDEMRKRLLDKINQFSVRGFLDELDEIVLMSDEESKRNKSSEKEQKKSLIRLYLTIAYLITKSMVKINTRFSIACAMYERDYALLCQSEMKGGPWDGGAQALAVTRKFLNHDREVFDRYCAREAEIARLPSEERKPLRKANDKLLKQTHYTNHSYTYIVNNLNSFTDIDYCAKDVGLPAPNDKNDNASILGEMRNDIAHLNIVHDMVKYIEELKDISSYYAFYCYVLQRRLVGKDPNCQNKFKAKYAKELNDYGTYNKNLMWMLNLPFAYNLPRYKNLSSEFLFYDMEYNKKDDE

SEQ ID NO: 310 - protein, 1027 aa, Unknown
  Description of Unknown: Pig gut metagenome sequence
MAKKITAKQRREERERQNKQKWAKKQADATAVFECEADIKPADSKDEDCTNIYIKREKKKTQAKAMGLKTVLGFDNKIAIASFMSSKDSKSSHIERITDPNGKTIREDVRMFDSNVDECSINLEKRMTVEERQKDGTIKKDEKDVKSTICNPYSNECGKDYIGIKSVAEELFFGRTFPNDNLRVQIAYNIFDIQKILGTYINNIIYSFYNLSRDESQSDNDVIGTLYMLKDFDGQKETDTFRQARALLERTEAYYSYFDNVFKKIDKNKKKSDDCKRERNEILRYNFNVLRVLSFLRQICAHAQVKISNEHDREKGGGLVDSLDALFNISRFFDAVAPELNEVINSVYSKGIDDINDNFVKNGKNNFYILSKIYPEVAREDLLREYYYFVVSKEGNNIGISTKKLKEAIIVQDMSYIKSEDYDTYRNKLYTVLCFILVKELNERTTIREQMVADLRANMNGDIGREDIYSKYAKIIYAQVKPRFDTMKSAFEEEAKDVIVPDKKKPVKFSHGKLDKNEIERFCITSANTDSVAKIIYFLCKFLDGKEINELCCAMMNKLDGINDLIETAEQCGAKVEFVDKFSVLSNCETISDQIRIVKSISKMKKEIAIDNDTIFLDALELLGRKIDKYKKDATGKYLKDENGKYLYSKEYDDFQYMFFKDSHRVRNFISNSVIKSKWFSYIVRYNQPSECRAIMKNKTLVKFALDELPDLQIQRYFVALYGDEDLPSYGEMRKILLKKLHDFSIKGFLDEIVLLSDLDMESQDKYCEKEQKKSLFRLYLTIAYLITKSMVKINTRFSIACATYERDYALLCASNKQERAWSSGATALALTRRFLNQDKLIFEKHYAREGEISKLPKEERKAMRKVNDQLLKRTHFSKHSYCYIVDNVNRLTGGECRTDKRVLPVLNEKNDNAGILLDFRKTIAHLNVVHKMVDYVDEIKGITSYYAFFCYVLQRMLVGNNLNEKNAIKEKYSATVKSFGTYSKDFMWLINLPFAYNLPRYKNLSNEQLFYDEEERNETEEQIDRL

SEQ ID NO: 311 - protein, 961 aa, Unknown
  Description of Unknown: Metagenomic hit sequence
MAKKKKTARQLREEMQQQRKQAIQKQQEQRQEKAAAARETAAPEQPAAAPVPKRQRKSLAKAAGLKSNFILDPQRRTTVMTAFGQGSTAILEKQIVDRAISDLQPVQQFQVEPASAAKYRLKNSRVRFPNVTADDPLYRRKDGGFVPGMDALRRKNVLEQRFFGKSFADNIHIQMIYSILDIHKILAAASGHIVHLLNIVNGSKDRDFIGMLAAHVLYNELNEEAKRSIADFCKSPRLIYYSAAFYETLDNGKSERRSNEDIFNILALMTCLRNFSSHHSIAIKVKDYSAAGLYNLRRLGPDMKKMLDTFYTEAFIQLNQSFQDHNTTNLTCLFDILNISDSARQKQLAEEFYRYVVFKEQKNLGFSVRKLREEMLLLPDAAVIADKRYDTCRSKLYNLMDFLILRVYRTGRADRCDKLPEALRAALTDEEKAVVYHKEALSLWNEMRTLILDGLLPQMTPENLSRLSGQKRKGELSLDDAMLKECLYEPGPVPEDAAPEEANAEYFCRMIYLATLFMDGKEINTLLTTLISKFENIAAFLQTMEQLNIEAELGPEYAMFTRSRAVAEQLRVINSFALMKKPQVNAKQQLYRAAVTLLGTEDPDGVTDEMLCIDPVTGKMLPPNQRHHGDTGLRNFIANNVVESRRFQYLIRYSDPAQLHQLASNKKLVRFVLSSIPDTQINRYYETCGQTRLAGRAAKVEFLTDMIAAIRFDQFRDVNQKERGANTQKERYKAMLGLYQTVLYLAVKNLVNINARYVMAFHCVERDMFLYDGELTDPKGESVSAFLAVNGKKGVQPQYLLLTQLFIRRDYLKRSACEQIQHNMENISDRLLREYRNAVAHLNVIAHLADYSADMREITSYYGLYHYLMQRHLFKRHAWQIRQPERPTEEEQKLIEQEQKQLAWEKALFDKTLQYHSYNKDLVKALNAPFGYNLARYKNLSIEPLFSKEAAPAAEIKATHA

SEQ ID NO: 312 - protein, 911 aa, Unknown
  Description of Unknown: Metagenomic hit sequence
MKQNDRENNNKIKKSAAKAVGVKSLARLSDGSTVVSSFGKGAAAELESLITGGEIRKLSDKAILEITDDTQNKNAYNVKSSRIPNLTARTDKLSDKSGMDDLGFKRELELEVFGQCFDDSIHIQIAHAVFDIQKSLAAVIPNVLYTLNNLDRSYSTDNTSDKKDIIGNTLNYQHSYESFNVEKRGEFTEYYNAAKDRFSYFPDILCVLEKVNGKDRYQPKSEKDAFNVLSSVNMLRNSLFHFAPKSNDGKARIAVFKNQFDSDFSHITSTVNKIYSAKIAGVNENFLNNEGNNLYIILKATNWDIKKIVPQLYRFSVLKSDKNMGFNMRKLREFAVESKNIDLSRLNDKFLTNNRKKLYKVIDFIIYYHLNKVLKDSFVDDFVAALRASQSEEEKEKLYAQYSERLFADEGLKSAIKKAVDMISDTKSNIFKMKTPLDKALIENIKVNSDASDFCKLIYVFTRFLDGKEINILLNSLIKKFQDIHSFNTTVKKLSENNLIINADYVDDYSLFEQSGTVARELMLIKSISKMDFGLDNINLSFMYDDALRTLGVSDENLPEVKREYFGKTKNLSAYIRNNVLENRRFKYVIKYIHPSDVQKIACNKAIAGFVLNRMPDTQIKRYYDSLINKGATDIQAQAKALLDCITGISFDAIKDDKHLHKSKEKSPQRSADRERKKAMLTLYYTIVYIFVKQMLHINSLYTIGFFYLERDQRFIYSRAKKENKNPSKNSYLNDFRSVTAYFIPSEIMKRIEKNENKGFLEDFEALWNSCGKTSRLRKEDVLLYARYISPDHALKNYKMILNSYRNKIAHINVIMSAGKYTGGIKRMDSYFSVFQHLVQCDILSNPNNKGKCFESESLKPLLLDMKFDGTDEKLYSKRLTRALNIPFGYNVPRYKNLTFEKIYLKSSINE

SEQ ID NO: 313 - protein, 904 aa, Unknown
  Description of Unknown: Metagenomic hit sequence
MADIDKKKSSAKAAGLKSTFVLENNKLLMTSFGNGNKAVIEKIIDEKVDSINEPEVFSVTPCDKKFELQPAKRGLAADSLVDNPLKSKKTAGDDAIHSRKFLERQFFDGNTFNDNIHIQLIYNILDIEKILSVHVNDIVYSVNNILSRGEGMEYNDYIGTLNLKSFETYKNNLVNKKKFDLDRVKKIPQLAYFGSAFYNTPEDTSAKITKTKIKSNEEIYYTFMLLSTARNFSAHYLDRNRAKSSDAEDFDGTSVIMYNLDNEELYKKLYNKKVHMALTGMKKVLDANFNKKVEHLNNSFIKNSAKDFVILCEVLGIKSRDEKTKFVKDYYDFVVRKNYKHLGFSVKELRELLFANHDSNKYIKEFDKISNKKFDSVRSRLNRLADYIIYDYYNKNNAKVSDLVKYLRAAADDEQKKKIYLNESINLVKSGILERIKKILPKLNGKIIGNMQPDSTITASMLHNTGKDWHPISENAHYFTKWIYTLTLFMDGKEINDLVTTLINKFDNIASFIEVLKSQSVCTHFSEERKMFIDSAEICSELSAMNSFARMEAPGASSKRAMFVEAARILGDNRSKEELEEYFDTLFDKSASKKEKGFRNFIRNNVVDSNRFKYLTRYTDTSSVKAFSNNKALVKFAIKDIPQEQILRYYNSCFGASERYYNDGMSDKLVEAIGKINLMQFNGVIQQADRNMLPEEKKKANAQKEKYKSIIRLYLTVCYLFFKNLVYVNSRYYSAFYNLEKDRSLFEINGELKPTGKFDEGHYTGLVKLFIDNGWINPRASAYLTVNLANSDETAIRTFRNTAEHLEALRNADKYLNDLKQFDSYFEIYHYITQRNIKEKCEMLKEQTVKYNNDLLKYHGYSKDFVKALCVPFGYNLPRFKNLSIDALFDKNDKREKLKKGFED

SEQ ID NO: 314 - protein, 933 aa, Unknown
  Description of Unknown: Metagenomic hit sequence
MERQKRKMKSKSKMAGVKSVFVIGDELLMTSFGDGDDAVLEKDIDENGVVNDCRNPAAYDAVYGTDSIRVKKTNNNIRAKVNNPLAKSNIRSEESALFRTRVNEYKREQKDKYETLFFGKTFDDNIHIQLISKILDIEKTFSVVIGNIVYAINNLSLEQSIDRPIDIFGDKNTQGISLREDNDYLKTMLPRCEYLFHNILNSDSDNNSKMNYNKVNKGKEEKDNRNNENIEKLKKALEVIKIIRVDSFHGVDGIKGDQKFPRSKYNLAVNYNEEIQKTISEPFNRKVEEVQQDFYRNSCVNIDFLKEIMYGSNYTDRGSDSLECSYFNFAILKQNKNMGFSITSIRECLLDLYELNFESMQNLRPRANSFCDFLIYDYYCKNESERANLVDCLRSAASEEEKKNIYFQTAERVKEKFRNAFNRISRFDASYIKNSREKNLSGGSSLPKYSFIEGFTKRSKKINDNDEKNADLFCNMLYYLAQFLDGKEINIFLTSIHNIFQNIDSFLKVMKEKGMECKFQKDFKMFSHAGHVAKKIEIVISLAKMKKTLDFYNAQALKDAVTILGVSKKHQYLDMNSYLDFYMFDNRSGATGKNAGKDHNLRNFLVSNVIRSRKFNYLSRYSNLAEVKKLAQNPSLVQFVLSRIEPSLICRYYESSQGISSEGITIDEQIKKLTGIIVDMNIDSFENINNGEIGMRYSKATPQSIERRNQMRVCVGLYLNVLYQIEKNLMNVNARYVLAFAFAERDALMLNFTLEECKKNKKRSSGGFSFIEMTQFFIDKKLFKVATEAIKKNVLKYNGNPESLNHIPGEYICKNMEGYHENTVRNFRNMVAHLTAVARVPLYISEVTQIDSYYALYHYCMQMNILQGIEQSGKILDNIKLKNALENARVHRTYSKDAVKYLCLPFAYNISRYKALTIKDLFDWTEYSCKKDE

SEQ ID NO: 315 - protein, 973 aa, Unknown
  Description of Unknown: Cas13d from Ga0129306_1000735 sequence
MQKQREQQTVTDESERKKKPLKSGAKAAGLKSVFVLSEGKELLTSFGRGNEAVPEKRVTGGTIANARTDNKEAFSAALQNKRFEVFGRTAGSSDDPLAVSRAPGQDLIGAKTALEERYFGRAFADNIHMQVIYAIQDINKILAVHANNIVYTLNNLDREADPETDDFIGSGYLTLKNTFETYCDPAALNEREREKVTVSKQHFDAFMQNPRLAYYGNAFFRKLSKAERLARGREIFDKESPERRQEILGSRGKNKSVDDEIRALAPEWVKREERDVYSELVLMSELRQSCFHGQQKNSARIFRLDNDLGPGVDGARELLDRLYAEKINDLRSFDKTSASSNFRLLFNAYHADNEKKKELAQEFYRFSVLKVSKNTGFSIRTLREKIIEDHAAQYRDKIYDSMRKKLFSTFDFFLWRFYEEREDEAEELRACLRAARSDEEKEQIYAEAAASCWPSVKPFVESVAATLCDVVKGRTKLNKLKLSADESTLVRNAIDGVRISPRASYFTKLIYLMTLFLDGKEINDLLTTLIHAFENIDSFLSVLGSERLERTFDANYRIFADSGVIAQELRAVNSFARMTTEPFNSKLVMFEDAAQLFGMSGGLVEHAEELREYLDNKMLDKTKLRLLPDGKVDTGFRNFIISNVTESRRFRYLVRYCEPRAVRDYMSCRPLIRLTLRDMPDTILRRYYEQSVGAATVDRERILDTLADKLLSLRFTDFENVNQRANAERNREKQKMMGIISLYLNVAYQIVKNLVYVNARYTMAYHCAERDTELLLNAAGEGNLLRRDRSWPARLHLPRRALARRRDRVEVMERDVARGPEAYNRDEWLGLVRTLRREKRVCDNLHNNYAYLCGADAEPGDASLSLLFVYRNKAAHLSVLNKGGRLSGDLKEAKSWFYVYHFLMQRVLEEEFRNTQALPERLRELLMMAERYRGCSKDLIKVLNLTFAYNLPRYKNLSIDGRFDKNHPDPSDE

SEQ ID NO: 316 - protein, 854 aa, Unknown
  Description of Unknown: Cas13d from Ga0129317_1008067 sequence
MKKQKKSLVKAAGLKSAFVVGDSVYLTSFGKGNAARLDTKINPDNSTERYVSDSEKHTLKINSITDTELRLSGPFPKQAEAKNPTHKKDNEQKNTRQDMLGLKSTLEKFYFGSTFDDNIHIQIIHNIQDIAKILAAHSNNAGYALDNMLAYQGVEFSDMIGYMGTSRTFDNYDPNHKNNKDFFRFLKLPRLGYFGSAFYSQKGKDFEKRSDEEVYNICALMGQIRQCCFHGKQEKYQLKWLYNFHNFKSNKPFLDTLDKHFDEMIDRINKNFIKNNTPDLIILSGLYPDMAKKELVRLFYDFTTVKEYKNMGFSVKKLREKMLESEEASDFRDKDYDSVRRKLYKLMDFCIYYLYYSDSERNENLVSRLRESLTDENKDIIYSKEAKIVWNELRKKFSTILDNVKGSNIKKLENVKEKFISEDEFDDIKLDIDISYFSKLMYVMCYFLDGKEINDLLTTLVSKFDNIGSIIEAATQIGINIEFIDDFKFFDRSKDISVELNIIRNFARMQAPVPNAKRAMQEDAIRILGGSEEDIFSILDDMTGYDKSGKKLAQSKKGFRNFIINNVVESSRFKYIVRYSNPQKIRKLANNSVVVGFVLGKLPDAQIESYFNSCLPNRVYSTPDKARESLRDMLHNISFNDFADVKQDDRRATPEEKVEKERYKAIIGLYLTVMYHLVKNLVYVNSRYVMAFHCLERDAMHYDVSLDNYRDLIRHLISEGDSSCNHFISHNRRMRDCIEENVKNSEQLIFGKEDAVIRFRNNVAHLSAIRNANEYIGDIREITSYFALYHYLMQRKLIDDCKVNDTAHKYFEQLTKYKTYVMDMVKALCSPFGYNLPRFKNLSIEGKFDMHESK

SEQ ID NO: 317 - protein, 965 aa, Unknown
  Description of Unknown: Cas13d from Ga0224415_10048792 sequence
MSKKENRKSYVKGLGLKSTLVSDSKVYLTTFADGSNAKLEKCVENNKIICISNDKEAFAASIANKNVGYKIKNDEKFRHPKGYDIISNNPLLHNNSVQQDMLGLKNVLEKRYFGKSSGGDNNLCIQIIHNIIDIEKILSEYIPNVVYAFNNIAGFKDEHNNIIDIIGTQTYNSSYTYADFSKDKSDKKYIEFQKLLKNKRLGYWGKAFFTGQGNNAKVRQENQCFHIIALLISLRNWATHSNELDKHTKRTWLYKLDDTNILNAEYVKTLNYLYDTIADELTKSFSKNGAVNVNYLAKKYNIKDDLPGFSEQYFRFSIMKEQKNLGFNISKLRENMLDFKDMSVIRDDHNRYDKDRSKIYTMMDFVIYRYYIDNNNDSIDFINKLRSSIDEKSKEKLYNEEANRLWNKLKEYMLYIKEFNGKLASRTPDRDGNISEFVESLPKIHRLLPRGQKISNFSKLMYLLTMFLDGKEINDLLTTLINKFENIQGFLDIMPEINVNAKFEPEYVFFNKSHEIAGELKLIKGFAQMGEPAATLKLEMTADAIKILGTEKEDAELIKLAESLFKDENGKLLGNKQHGMRNFIGNNVIKSKRFHYLIRYGDPAHLHKIATNKNVVRFVLGRIADMQKKQGQKGKNQIDRYYEVCVGNKDIKKTIEEKIDALTDIIVNMNYDQFEKKKAVIENQNRGKTFEEKNKYKRDNAEREKFKKIISLYLTVIYHILKNIVNVNSRYILGFHCLERDKQLYIEKYNKDKLDGFVALTKFCLGDEERFEDLKAKAQASIQALETANPKLYAKYMNYSDEEKKEEFKKQLNRERVKNARNAYLKNIKNYIMIRLQLRDQTDSSGYLCGEFRDKVAHLEVARHAHEYIGNIKEVNSYFQLYHYIMQCRLYDVLKNNTKAEAMVKGKAKEYFEALEKEGTYNDKLLKIACVPFGYCIPRYKNLSMEELFDMNEEKKFKKKAPENT

SEQ ID NO: 318 - protein, 998 aa, Unknown
  Description of Unknown: Cas13d from 250twins_35838_GL0110300 sequence
MGNKQRVSAQKRRENAKLCNQQKARQAESQRDKIKNMNVEKMKNINTNDIKHTKTTAKKLGLKSTIIADKKIILTSFINEQSSKTANIEKVAGFKGDTIDTISYTPRMFRSEINPGEIVISKGDDLSEFANPANFPIGRDYVKIRSALEKQYFGKEFPEDNLHVQIAYNVADIKKILSVYINNIIYMFYNLARSEEYDIFYNSQSENSGRDCDVIGSLYYQASYRNQDANRFEKDGKKKAIDSLLDDTRAYYTYFDGLFSVPKREDDGKIKESEKEKAKDQNFDVLRLLSVGRQLTFHSDKSNNEAYLFDLSKLTRAAQDENRRQDIQSLLNILNSTCRSNLEGVNGDFVKHAKNNLYVLNQLYPSLKANDLIGEYYNFIVKKENRNIGIRLITVRELIIEHNYTNLKDSKYDTYRNKIYTVLNFILFREIQENSIAIKNFREKLRSTEKAEQPALYQAFANKIYPMVQAKFAKAIDLFEEQYKTKFKSEFKGGISIENMQQQNILLQTENIDYFSKYVLFLTKFLDGKEINELLCALINKFDNIADLLDISKQIGTPVVFCADYESLNDAAKIAENIRLIKNIAHLRPAIQEAQSSKDNADAAGTPATLLIDAYNMLNTDIQLVYGEAAYEELRKDLFERKNGTKYNKKGKKVDVYDHKFRNFLINNVIKSKWFFYIAKYVKPADCAKMMSNKKMIEFALRDLPETQIKRYYYTITGNEALGDAESLKGVIIEQLHAFSIKNTLLSIKNMGEGEYKIQQIGSSKEKLKAIVNLYLTVAYLLTKSLVKVNIRFSIAFGCLERDLVLQKKSEKKFDAIINEILLEDDKIRKECDKERAQAKTLPRELAQERFAQIKRRESGCYFKSYHVYDYLSKNSNEFKQNHIDFAVTSYRNNVEHLNVVHCMTKYFSEVKDVKSYYGVYCYIMQRMLCDELIIKNQDKPDVRQTFEEYNRLLKDHGTYSKNLMWLLNFPFAYNLARYKNLSNEDLFNAKNNDQKSK

SEQ ID NO: 319 - protein, 1020 aa, Unknown
  Description of Unknown: Cas13d from 250twins_36050_GL0158985 sequence
MKKKHQSAAEKRQVKKLKNQEKAQKYASEPSPLQSDTAGVECSQKKTVVSHIASSKTLAKAMGLKSTLVMGDKLVITSFAASKAVGGAGYKSANIEKITDLQGRVIEEHERMFSADVGEKNIELSKNDCHTNVNNPVVTNIGKDYIGLKSRLEQEFFGKTFENDNLHVQLAYNILDIKKILGTYVNNIIYIFYNLNRAGTGRDERMYDDLIGTLYAYKPMEAQQTYLLKGDKDMRRFEEVKQLLQNTSAYYVYYGTLFEKVKAKSKKEQRAKEAEIDACTAHNYDVLRLLSLMRQLCMHSVAGTAFKLAESALFNIEDVLSADLKEILDEAFSGAVNKLNDGFVQHSGNNLYVLQQLYPNETIERIAEKYYRLTVRKEDLNMGVNIKKLRELIVGQYFPEVLDKEYDLSKNGDSVVTYRSKIYTVMNYILLYYLEDHDSSRESMVEALRQNREGDEGKEEIYRQFAKKVWNGVSGLFGVCLNLFKTEKRNKFRSKVALPDVSGAAYMLSSENIDYFVKMLFFVCKFLDGKEINELLCALINKFDNIADILDAAAQCGSSVWFVDSYRFFERSRRISAQIRIVKNIASKDFKKSKKDSDESYPEQLYLDALALLGDVISKYKQNRDGSVVIDDQGNAVLTEQYKRFRYEFFEEIKRDESGGIKYKKSGKPEYNHQRRNFILNNVLKSKWFFYVVKYNRPSSCRELMKNKEILRFVLRDIPDSQVRRYFKAVQGEEAYASAEAMRTRLVDALSQFSVTACLDEVGGMTDKEFASQRAVDSKEKLRAIIRLYLTVAYLITKSMVKVNTRFSIAFSVLERDYYLLIDGKKKSSDYTGEDMLALTRKFVGEDAGLYREWKEKNAEAKDKYFDKAERKKVLRQNDKMIRKMHFTPHSLNYVQKNLESVQSNGLAAVIKEYRNAVAHLNIINRLDEYIGSARADSYYSLYCYCLQMYLSKNFSVGYLINVQKQLEEHHTYMKDLMWLLNIPFAYNLARYKNLSNEKLFYDEEAAAEKADKAENERGE

SEQ ID NO: 320 - protein, 683 aa, Homo sapiens
MALSKRELDELKPWIEKTVKRVLGFSEPTVVTAALNCVGKGMDKKKAADHLKPFLDDSTLRFVDKLFEAVEEGRSSRHSKSSSDRSRKRELKEVFGDDSEISKESSGVKKRRIPRFEEVEEEPEVIPGPPSESPGMLTKLQIKQMMEAATRQIEERKKQLSFISPPTPQPKTPSSSQPERLPIGNTIQPSQAATFMNDAIEKARKAAELQARIQAQLALKPGLIGNANMVGLANLHAMGIAPPKVELKDQTKPTPLILDEQGRTVDATGKEIELTHRMPTLKANIRAVKREQFKQQLKEKPSEDMESNTFFDPRVSIAPSQRQRRTFKFHDKGKFEKIAQRLRTKAQLEKLQAEISQAARKTGIHTSTRLALIAPKKELKEGDIPEIEWWDSYIIPNGFDLTEENPKREDYFGITNLVEHPAQLNPPVDNDTPVTLGVYLTKKEQKKLRRQTRREAQKELQEKVRLGLMPPPEPKVRISNLMRVLGTEAVQDPTKVEAHVRAQMAKRQKAHEEANAARKLTAEQRKVKKIKKLKEDISQGVHISVYRVRNLSNPAKKFKIEANAGQLYLTGVVVLHKDVNVVVVEGGPKAQKKFKRLMLHRIKWDEQTSNTKGDDDEESDEEAVKKTNKCVLVWEGTAKDRSFGEMKFKQCPTENMAREHFKKHGAEHYWDLALSESVLESTD

SEQ ID NO: 321 - protein, 659 aa, Homo sapiens
MPSGSSAALALAAAPAPLPQPPPPPPPPPPPLPPPSGGPELEGDGLLLRERLAALGLDDPSPAEPGAPALRAPAAAAQGQARRAAELSPEERAPPGRPGAPEAAELELEEDEEEGEEAELDGDLLEEEELEEAEEEDRSSLLLLSPPAATASQTQQIPGGSLGSVLLPAARFDAREAAAAAAAAGVLYGGDDAQGMMAAMLSHAYGPGGCGAAAAALNGEQAALLRRKSVNTTECVPVPSSEHVAEIVGRQGCKIKALRAKTNTYIKTPVRGEEPIFVVTGRKEDVAMAKREILSAAEHFSMIRASRNKNGPALGGLSCSPNLPGQTTVQVRVPYRVVGLVVGPKGATIKRIQQQTHTYIVTPSRDKEPVFEVTGMPENVDRAREEIEMHIAMRTGNYIELNEENDFHYNGTDVSFEGGTLGSAWLSSNPVPPSRARMISNYRNDSSSSLGSGSTDSYFGSNRLADFSPTSPFSTGNFWFGDTLPSVGSEDLAVDSPAFDSLPTSAQTIWTPFEPVNPLSGFGSDPSGNMKTQRRGSQPSTPRLSPTFPESIEHPLARRVRSDPPSTGNHVGLPIYIPAFSNGTNSYSSSNGGSTSSSPPESRRKHDCVICFENEVIAALVPCGHNLFCMECANKICEKRTPSCPVCQTAVTQAIQIHS

SEQ ID NO: 322 - protein, 115 aa, Homo sapiens
YGGDDAQGMMAAMLSHAYGPGGCGAAAAALNGEQAALLRRKSVNTTECVPVPSSEHVAEIVGRQGECRGGEVQLGMAPGVGGETRERSVGRKRRTRRGPQVHREGVWEEPRVDQM

SEQ ID NO: 323 - protein, 489 aa, Homo sapiens
MPSGSSAALALAAAGVLYGGDDAQGMMAAMLSHAYGPGGCGAAAAALNGEQAALLRRKSVNTTECVPVPSSEHVAEIVGRQGCKIKALRAKTNTYIKTPVRGEEPIFVVTGRKEDVAMAKREILSAAEHFSMIRASRNKNGPALGGLSCSPNLPGQTTVQVRVPYRVVGLVVGPKGATIKRIQQQTHTYIVTPSRDKEPVFEVTGMPENVDRAREEIEMHIAMRTGNYIELNEENDFHYNGTDVSFEGGTLGSAWLSSNPVPPSRARMISNYRNDSSSSLGSGSTDSYFGSNRLADFSPTSPFSTGNFWFGDTLPSVGSEDLAVDSPAFDSLPTSAQTIWTPFEPVNPLSGFGSDPSGNMKTQRRGSQPSTPRLSPTFPESIEHPLARRVRSDPPSTGNHVGLPIYIPAFSNGTNSYSSSNGGSTSSSPPESRRKHDCVICFENEVIAALVPCGHNLFCMECANKICEKRTPSCPVCQTAVTQAIQIHS

SEQ ID NO: 324 - protein, 518 aa, Homo sapiens
MECDLMETDILESLEDLGYKGPLLEDGALSQAVSAGASSPEFTKLCAWLVSELRVLCKLEENVQATNSPSEAEEFQLEVSGLLGEMNCPYLSLTSGDVTKRLLIQKNCLLLLTYLISELEAARMLCVNAPPKKAQEGGGSEVFQELKGICIALGMSKPPANITMFQFFSGIEKKLKETLAKVPPNHVGKPLLKKPMGPAHWEKIEAINQAIANEYEVRRKLLIKRLDVTVQSFGWSDRAKSQTEKLAKVYQPKRSVLSPKTTISVAHLLAARQDLSKILRTSSGSIREKTACAINKVLMGRVPDRGGRPNEIEPPPPEMPPWQKRQDGPQQQTGGRGGGRGGYEHSSYGGRGGHEQGGGRGGRGGYDHGGRGGGRGNKHQGGWTDGGSGGGGGYQDGGYRDSGFQPGGYHGGHSSGGYQGGGYGGFQTSSSYTGSGYQGGGYQQDNRYQDGGHHGDRGGGRGGRGGRGGRGGRAGQGGGWGGRGSQNYHQGGQFEQHFQHGGYQYNHSGFGQGRHYTS

SEQ ID NO: 325 - protein, 312 aa, Homo sapiens
MECDLMETDILESLEDLGYKGPLLEDGALSQAVSAGASSPEFTKLCAWLVSELRVLCKLEENVQATNSPSEAEEFQLEVSGLLGEMNCPYLSLTSGDVTKRLLIQKNCLLLLTYLISELEAARMLCVNAPPKKAQEGGGSEVFQELKGICIALGMSKPPANITMFQFFSGIEKKLKETLAKVPPNHVGKPLLKKPMGPAHWEKIEAINQAIANEYEVRRKLLIKRLDVTVQSFGWSDRAKSQTEKLAKVYQPKRSVLSPKTTISVAHLLAARQDLSKILRTSSGSIREKTACAINKVIRVPLIFSKCIYFCS

SEQ ID NO: 326 - protein, 68 aa, Homo sapiens
MECDLMETDILESLEDLGYKGPLLEDGALSQAVSAGASSPEFTKLCAWLVSELRVLCKLEENVQATNS

SEQ ID NO: 327 - protein, 480 aa, Homo sapiens
MFPNSILGRPPFTPNHQQHNNFFTLSPTVYSHQQLIDAQFNFQNADLSRAVSLQQLTYGNVSPIQTSASPLFRGRKRLSDEKNLPLDGKRQRFHSPHQEPTVVNQIVPLSGERRYSMPPLFHTHYVPDIVRCVPPFREIAFLEPREITLPEAKDKLSQQILELFETCQQQISDLKKKELCRTQLQREIQLLFPQSRLFLVGSSLNGFGTRSSDGDLCLVVKEEPVNQKTEARHILTLVHKHFCTRLSGYIERPQLIRAKVPIVKFRDKVSCVEFDLNVNNIVGIRNTFLLRTYAYLENRVRPLVLVIKKWASHHQINDASRGTLSSYSLVLMVLHYLQTLPEPILPSLQKIYPESFSPAIQLHLVHQAPCNVPPYLSKNESNLGDLLLGFLKYYATEFDWNSQMISVREAKAIPRPDGIEWRNKYICVEEPFDGTNTARAVHEKQKFDMIKDQFLKSWHRLKNKRDLNSILPVRAAVLKR

SEQ ID NO: 328 - protein, 441 aa, Homo sapiens
MFPNSILGRPPFTPNHQQHNNFFTLSPTVYSHQQLIDAQFNFQNADLSRAVSLQQLTYGNVSPIQTSASPLFRGRKRLSDEKNLPLDGKRQRFHSPHQEPTVVNQIVPLSGERRYSMPPLFHTHYVPDIVRCVPPFREIAFLEPREITLPEAKDKLSQQILELFETCQQQISDLKKKELCRTQLQREIQLLFPQSRLFLVGSSLNGFGTRSSDGDLCLVVKEEPCFFQVNQKTEARHILTLVHKHFCTRLSGYIERPQLIRAKVPIVKFRDKVSCVEFDLNVNNIVGIRNTFLLRTYAYPLPEPILPSLQKIYPESFSPAIQLHLVHQAPCNVPPYLSKNESNLGDLLLGFLKYYATEFDWNSQMISVREAKAIPRPDGIEWRNKYICVEEPFDGTNTARAVHEKQKFDMIKDQFLKSWHRLKNKRDLNSILPVRAAVLKR

SEQ ID NO: 329 - protein, 484 aa, Homo sapiens
MFPNSILGRPPFTPNHQQHNNFFTLSPTVYSHQQLIDAQFNFQNADLSRAVSLQQLTYGNVSPIQTSASPLFRGRKRLSDEKNLPLDGKRQRFHSPHQEPTVVNQIVPLSGERRYSMPPLFHTHYVPDIVRCVPPFREIAFLEPREITLPEAKDKLSQQILELFETCQQQISDLKKKELCRTQLQREIQLLFPQSRLFLVGSSLNGFGTRSSDGDLCLVVKEEPCFFQVNQKTEARHILTLVHKHFCTRLSGYIERPQLIRAKVPIVKFRDKVSCVEFDLNVNNIVGIRNTFLLRTYAYLENRVRPLVLVIKKWASHHQINDASRGTLSSYSLVLMVLHYLQTLPEPILPSLQKIYPESFSPAIQLHLVHQAPCNVPPYLSKNESNLGDLLLGFLKYYATEFDWNSQMISVREAKAIPRPDGIEWRNKYICVEEPFDGTNTARAVHEKQKFDMIKDQFLKSWHRLKNKRDLNSILPVRAAVLKR

SEQ ID NO: 330 - protein, 484 aa, Homo sapiens; identical to SEQ ID NO: 329

SEQ ID NO: 331 - protein, 484 aa, Homo sapiens; identical to SEQ ID NO: 329

SEQ ID NO: 332 - protein, 698 aa, Homo sapiens
MRPRPRSAPGKPRRRSRARLRSSRTPSGGASGGGGSSSSSSTATGGSGSSTGSPGGAASAPAPAPAGMYRSGERLLGSHALPAEQRDFLPLETTNNNNNHHQPGAWARRAGSSASSPPSASSSPHPSAAVPAADPADSASGSSNKRKRDNKASTYGLNYSLLQPSGGRAAGGGRADGGGVVYSGTPWKRRNYNQGVVGLHEEISDFYEYMSPRPEEEKMRMEVVNRIESVIKELWPSADVQIFGSFKTGLYLPTSDIDLVVFGKWENLPLWTLEEALRKHKVADEDSVKVLDKATVPIIKLTDSFTEVKVDISFNVQNGVRAADLIKDFTKKYPVLPYLVLVLKQFLLQRDLNEVFTGGIGSYSLFLMAVSFLQLHPREDACIPNTNYGVLLIEFFELYGRHFNYLKTGIRIKDGGSYVAKDEVQKNMLDGYRPSMLYIEDPLQPGNDVGRSSYGAMQVKQAFDYAYVVLSHAVSPIAKYYPNNETESILGRIIRVTDEVATYRDWISKQWGLKNRPEPSCNGNGVTLIVDTQQLDKCNNNLSEENEALGKCRSKTSESLSKHSSNSSSGPVSSSSATQSSSSDVDSDATPCKTPKQLLCRPSTGNRVGSQDVSLESSQAVGKMQSTQTTNTSNSTNKSQHGSARLFRSSSKGFQGTTQTSHGSLMTNKQHQGKSNNQYYHGKKRKHKRDAPLSDLCR

SEQ ID NO: 333 - protein, 588 aa, Homo sapiens
MYRSGERLLGSHALPAEQRDFLPLETTNNNNNHHQPGAWARRAGSSASSPPSASSSPHPSAAVPAADPADSASGSSNKRKRDNKASTYGLNYSLLQPSGGRAAGGGRADGGGVVYSGTPWKRRNYNQGVVGLHEEISDFYEYMSPRPEEEKMRMEVVNRIESVIKELWPSADVQIFGSFKTGLYLPTSDIDLVVFGKWENLPLWTLEEALRKHKVADEDSVKVLDKATVPIIKLTDSFTEVKVDISFNVQNGVRAADLIKDFTKLHPREDACIPNTNYGVLLIEFFELYGRHFNYLKTGIRIKDGGSYVAKDEVQKNMLDGYRPSMLYIEDPLQPGNDVGRSSYGAMQVKQAFDYAYVVLSHAVSPIAKYYPNNETESILGRIIRVTDEVATYRDWISKQWGLKNRPEPSCNGNGVTLIVDTQQLDKCNNNLSEENEALGKCRSKTSESLSKHSSNSSSGPVSSSSATQSSSSDVDSDATPCKTPKQLLCRPSTGNRVGSQDVSLESSQAVGKMQSTQTTNTSNSTNKSQHGSARLFRSSSKGFQGTTQTSHGSLMTNKQHQGKSNNQYYHGKKRKHKRDAPLSDLCR

SEQ ID NO: 334 - protein, 303 aa, Homo sapiens
  MOD_RES (1)..(1): Any amino acid
XIFGSFKTGLYLPTSDIDLVVFGKWENLPLWTLEEALRKHKVADEDSVKVLDKATVPIIKLTDSFTEVKVDISFNVQNGVRAADLIKDFTKKYPVLPYLVLVLKQFLLQRDLNEVFTGGIGSYSLFLMAVSFLQLHPREDACIPNTNYGVLLIEFFELYGRHFNYLKTGIRIKDGGSYVAKDEVQKNMLDGYRPSMLYIEDPLQPGNDVGRSSYGAMQVKQAFDYAYVVLSHAVSPIAKYYPNNETESILGRIIRVTDEVATYRDWISKQWGLKNRPEPSCNGKIFSLVQCRPLLPHSPALVM

SEQ ID NO: 335 - protein, 164 aa, Homo sapiens
  MOD_RES (1)..(1): Any amino acid
XQIPAPSWPIHGPVIHSAPGSAPSNIGLNDPSIIFAQPAARPVAIPNTSHDGHWPRTVAPNSLVNSGAVGNSEPGFRGLTPPIPWEHAPRPHFPLVPASWPYGLHQNFMHQGNARFQPNKPFYTQGKKAAIVEVECSRRKTAKIWRPEFKFPCYHLWLWEHHTY

SEQ ID NO: 336 - protein, 108 aa, Homo sapiens
ARPVAIPNTSHDGHWPRTVAPNSLVNSGAVGNSEPGFRGLTPPIPWEHAPRPHFPLVPASWPYGLHQNFMHQGNARFQPNKPFYTQDRCATRRCRERCPHPPRGNVSE

SEQ ID NO: 337 - protein, 1645 aa, Homo sapiens
MEESKTLKSENHEPKKNVICEESKAVQVIGNQTLKARNDKSVKEIENSSPNRNSSKKNKQNDICIEKTEVKSCKVNAANLPGPKDLGLVLRDQSHCKAKKFPNSPVKAEKATISQAKSEKATSLQAKAEKSPKSPNSVKAEKASSYQMKSEKVPSSPAEAEKGPSLLLKDMRQKTELQQIGKKIPSSFTSVDKVNIEAVGGEKCALQNSPRSQKQQTCTDNTGDSDDSASGIEDVSDDLSKMKNDESNKENSSEMDYLENATVIDESALTPEQRLGLKQAEERLERDHIFRLEKRSPEYTNCRYLCKLCLIHIENIQGAHKHIKEKRHKKNILEKQEESELRSLPPPSPAHLAALSVAVIELAKEHGITDDDLRVRQEIVEEMSKVITTFLPECSLRLYGSSLTRFALKSSDVNIDIKFPPKMNHPDLLIKVLGILKKNVLYVDVESDFHAKVPVVVCRDRKSGLLCRVSAGNDMACLTTDLLTALGKIEPVFIPLVLAFRYWAKLCYIDSQTDGGIPSYCFALMVMFFLQQRKPPLLPCLLGSWIEGFDPKRMDDFQLKGIVEEKFVKWECNSSSATEKNSIAEENKAKADQPKDDTKKTETDNQSNAMKEKHGKSPLALETPNRVSLGQLWLELLKFYTLDFALEEYVICVRIQDILTRENKNWPKRRIAIEDPFSVKRNVARSLNSQLVYEYVVERFRAAYRYFACPQTKGGNKSTVDFKKREKGKISNKKPVKSNNMATNGCILLGETTEKINAEREQPVQCDEMDCTSQRCIIDNNNLLVNELDFADHGQDSSSLSTSKSSEIEPKLDKKQDDLAPSETCLKKELSQCNCIDLSKSPDPDKSTGTDCRSNLETESSHQSVCTDTSATSCNCKATEDASDLNDDDNLPTQELYYVFDKFILTSGKPPTIVCSICKKDGHSKNDCPEDFRKIDLKPLPPMTNRFREILDLVCKRCFDELSPPCSEQHNREQILIGLEKFIQKEYDEKARLCLFGSSKNGFGFRDSDLDICMTLEGHENAEKLNCKEIIENLAKILKRHPGLRNILPITTAKVPIVKFEHRRSGLEGDISLYNTLAQHNTRMLATYAAIDPRVQYLGYTMKVFAKRCDIGDASRGSLSSYAYILMVLYFLQQRKPPVIPVLQEIFDGKQIPQRMVDGWNAFFFDKTEELKKRLPSLGKNTESLGELWLGLLRFYTEEFDFKEYVISIRQKKLLTTFEKQWTSKCIAIEDPFDLNHNLGAGVSRKMTNFIMKAFINGRKLFGTPFYPLIGREAEYFFDSRVLTDGELAPNDRCCRVCGKIGHYMKDCPKRKSSLLFRLKKKDSEEEKEGNEEEKDSRDVLDPRDLHDTRDFRDPRDLRCFICGDAGHVRRECPEVKLARQRNSSVAAAQLVRNLVNAQQVAGSAQQQGDQSIRTRQSSECSESPSYSPQPQPFPQNSSQSAAITQPSSQPGSQPKLGPPQQGAQPPHQVQMPLYNFPQSPPAQYSPMHNMGLLPMHPLQIPAPSWPIHGPVIHSAPGSAPSNIGLNDPSIIFAQPAARPVAIPNTSHDGHWPRTVAPNSLVNSGAVGNSEPGFRGLTPPIPWEHAPRPHFPLVPASWPYGLHQNFMHQGNARFQPNKPFYTQDRCATRRCRERCPHPPRGNVSE

SEQ ID NO: 338 - protein, 1644 aa, Homo sapiens
MEESKTLKSENHEPKKNVICEESKAVQVIGNQTLKARNDKSVKEIENSSPNRNSSKKNKQNDICIEKTEVKSCKVNAANLPGPKDLGLVLRDQSHCKAKKFPNSPVKAEKATISQAKSEKATSLQAKAEKSPKSPNSVKAEKASSYQMKSEKVPSSPAEAEKGPSLLLKDMRQKTELQQIGKKIPSSFTSVDKVNIEAVGGEKCALQNSPRSQKQQTCTDNTGDSDDSASGIEDVSDDLSKMKNDESNKENSSEMDYLENATVIDESALTPEQRLGLKQAEERLERDHIFRLEKRSPEYTNCRYLCKLCLIHIENIQGAHKHIKEKRHKKNILEKQEESELRSLPPPSPAHLAALSVAVIELAKEHGITDDDLRVRQEIVEEMSKVITTFLPECSLRLYGSSLTRFALKSSDVNIDIKFPPKMNHPDLLIKVLGILKKNVLYVDVESDFHAKVPVVVCRDRKSGLLCRVSAGNDMACLTTDLLTALGKIEPVFIPLVLAFRYWAKLCYIDSQTDGGIPSYCFALMVMFFLQQRKPPLLPCLLGSWIEGFDPKRMDDFQLKGIVEEKFVKWECNSSSATEKNSIAEENKAKADQPKDDTKKTETDNQSNAMKEKHGKSPLALETPNRVSLGQLWLELLKFYTLDFALEEYVICVRIQDILTRENKNWPKRRIAIEDPFSVKRNVARSLNSQLVYEYVVERFRAAYRYFACPQTKGGNKSTVDFKKREKGKISNKKPVKSNNMATNGCILLGETTEKINAEREQPVQCDEMDCTSQRCIIDNNNLLVNELDFADHGQDSSSLSTSKSSEIEPKLDKKQDDLAPSETCLKKELSQCNCIDLSKSPDPDKSTGTDCRSNLETESSHQSVCTDTSATSCNCKATEDASDLNDDDNLPTQELYYVFDKFILTSGKPPTIVCSICKKDGHSKNDCPEDFRKIDLKPLPPMTNRFREILDLVCKRCFDELSPPCSEQHNREQILIGLEKFIQKEYDEKARLCLFGSSKNGFGFRDSDLDICMTLEGHENAEKLNCKEIIENLAKILKRHPGLRNILPITTAKVPIVKFEHRRSGLEGDISLYNTLAQHNTRMLATYAAIDPRVQYLGYTMKVFAKRCDIGDASRGSLSSYAYILMVLYFLQQRKPPVIPVLQEIFDGKQIPQRMVDGWNAFFFDKTEELKKRLPSLGKNTESLGELWLGLLRFYTEEFDFKEYVISIRQKKLLTTFEKQWTSKCIAIEDPFDLNHNLGAGVSRKMTNFIMKAFINGRKLFGTPFYPLIGREAEYFFDSRVLTDGELAPNDRCCRVCGKIGHYMKDCPKRKSLLFRLKKKDSEEEKEGNEEEKDSRDVLDPRDLHDTRDFRDPRDLRCFICGDAGHVRRECPEVKLARQRNSSVAAAQLVRNLVNAQQVAGSAQQQGDQSIRTRQSSECSESPSYSPQPQPFPQNSSQSAAITQPSSQPGSQPKLGPPQQGAQPPHQVQMPLYNFPQSPPAQYSPMHNMGLLPMHPLQIPAPSWPIHGPVIHSAPGSAPSNIGLNDPSIIFAQPAARPVAIPNTSHDGHWPRTVAPNSLVNSGAVGNSEPGFRGLTPPIPWEHAPRPHFPLVPASWPYGLHQNFMHQGNARFQPNKPFYTQDRCATRRCRERCPHPPRGNVSE

SEQ ID NO: 339 - protein, 151 aa, Homo sapiens
  MOD_RES (1)..(1): Any amino acid
XQPQPFPQNSSQSAAITQPSSQPGSQPKLGPPQQGAQPPHQPAARPVAIPNTSHDGHWPRTVAPNSLVNSGAVGNSEPGFRGLTPPIPWEHAPRPHFPLVPASWPYGLHQNFMHQGNARFQPNKPFYTQDRCATRRCRERCPHPPRGNVSE

SEQ ID NO: 340 - protein, 105 aa, Homo sapiens
  MOD_RES (1)..(1): Any amino acid
XDGHWPRTVAPNSLVNSGAVGNSEPGFRGLTPPIPWEHAPRPHFPLVPASWPYGLHQNFMHQGNARFQPNKPFYTQAGLPMHSNQPILLSQGYPYLNVSYIQQKK

SEQ ID NO: 341 - protein, 338 aa, Homo sapiens
GWNAFFFDKTEELKKRLPSLGKNTESLGELWLGLLRFYTEEFDFKEYVISIRQKKLLTTFEKQWTSKCIAIEDPFDLNHNLGAGVSRKMTNFIMKAFINGRKLFGTPFYPLIGREAEYFFDSRVLTDGELAPNDRCCRVCGKIGHYMKDCPKRKRLKKKDSEEEKEGNEEEKDSRDVLDPRDLHDTRDFRDPRDLRCFICGDAGHVRRECPEVKLARQRNSSVAAAQLVRNLVNAQQVAGSAQQQGDQSIRTRQSSECSESPSYSPQPQPFPQNSSQSAAITQPSSQPGSQPKLGPPQQGAQPPHQIPAPSWPIHGPVIHSAPGSAPSNIGLNDPSII

SEQ ID NO: 342 - protein, 337 aa, Homo sapiens
  MOD_RES (1)..(1): Any amino acid
XIPQRMVDGWNAFFFDKTEELKKRLPSLGKNTESLGELWLGLLRFYTEEFDFKEYVISIRQKKLLTTFEKQWTSKCIAIEDPFDLNHNLGAGVSRKMTNFIMKAFINGRKLFGTPFYPLIGREAEYFFDSRVLTDGELAPNDRCCRVCGKIGHYMKDCPKRKRLKKKDSEEEKEGNEEEKDSRDVLDPRDLHDTRDFRDPRDLRCFICGDAGHVRRECPEVKLARQRNSSVAAAQLVRNLVNAQQVAGSAQQQGDQSIRTRQSSECSESPSYSPQPQPFPQNSSQSAAITQPSSQPGSQPKLGPPQQGAQPPHQVQMPLYNFPQSPPAQYSPMHNMG

SEQ ID NO: 343 - protein, 1203 aa, Homo sapiens
MEESKTLKSENHEPKKNVICEESKAVQVIGNQTLKARNDKSVKEIENSSPNRNSSKKNKQNDICIEKTEVKSCKVNAANLPGPKDLGLVLRDQSHCKAKKFPNSPVKAEKATISQAKSEKATSLQAKAEKSPKSPNSVKAEKASSYQMKSEKVPSSPAEAEKGPSLLLKDMRQKTELQQIGKKIPSSFTSVDKVNIEAVGGEKCALQNSPRSQKQQTCTDNTGDSDDSASGIEDVSDDLSKMKNDESNKENSSEMDYLENATVIDESALTPEQRLGLKQAEERLERDHIFRLEKRSPEYTNCRYLCKLCLIHIENIQGAHKHIKEKRHKKNILEKQEESELRSLPPPSPAHLAALSVAVIELAKEHGITDDDLRVRQEIVEEMSKVITTFLPECSLRLYGSSLTRFALKSSDVNIDIKFPPKMNHPDLLIKVLGILKKNVLYVDVESDFHAKVPVVVCRDRKSGLLCRVSAGNDMACLTTDLLTALGKIEPVFIPLVLAFRYWAKLCYIDSQTDGGIPSYCFALMVMFFLQQRKPPLLPCLLGSWSPLALETPNRVSLGQLWLELLKFYTLDFALEEYVICVRIQDILTRENKNWPKRRIAIEDPFSVKRNVARSLNSQLVYEYVVERFRAAYRYFACPQTKGGNKSTVDFKKREKGKISNKKPVKSNNMATNGCILLGETTEKINAEREQPVQCDEMDCTSQRCIIDNNNLLVNELDFADHGQDSSSLSTSKSSEIEPKLDKKQDDLAPSETCLKKELSQCNCIDLSKSPDPDKSTGTDCRSNLETESSHQSVCTDTSATSCNCKATEDASDLNDDDNLPTQELYYVFDKFILTSGKPPTIVCSICKKDGHSKNDCPEDFRKIDLKPLPPMTNRFREILDLVCKRCFDELSPPCSEQHNREQILIGLEKFIQKEYDEKARLCLFGSSKNGFGFRDSDLDICMTLEGHENAEKLNCKEIIENLAKILKRHPGLRNILPITTAKVPIVKFEHRRSGLEGDISLYNTLAQHNTRMLATYAAIDPRVQYLGYTMKVFAKRCDIGDASRGSLSSYAYILMVLYFLQQRKPPVIPVLQEIFDGKQIPQRMVDGWNAFFFDKTEELKKRLPSLGKNTESLGELWLGLLRFYTEEFDFKEYVISIRQKKLLTTFEKQWTSKCIAIEDPFDLNHNLGAGVSRKMTNFIMKAFINGRKLFGTPFYPLIGREA

SEQ ID NO: 344 - protein, 906 aa, Homo sapiens
MKNDESNKENSSEMDYLENATVIDESALTPEQRLGLKQAEERLERDHIFRLEKRSPEYTNCRYLCKLCLIHIENIQGAHKHIKEKRHKKNILEKQEESELRSLPPPSPAHLAALSVAVIELAKEHGITDDDLRVRQEIVEEMSKVITTFLPECSLRLYGSSLTRFALKSSDVNIDIKFPPKMNHPDLLIKVLGILKKNVLYVDVESDFHAKVPVVVCRDRKSGLLCRVSAGNDMACLTTDLLTALGKIEPVFIPLVLAFRYWAKLCYIDSQTDGGIPSYCFALMVMFFLQQRKPPLLPCLLGSWIEGFDPKRMDDFQLKGIVEEKFVKWECNSSSATEKNSIAEENKAKADQPKDDTKKTETDNQSNAMKEKHGKSPLALETPNRVSLGQLWLELLKFYTLDFALEEYVICVRIQDILTRENKNWPKRRIAIEDPFSVKRNVARSLNSQLVYEYVVERFRAAYRYFACPQTKGGNKSTVDFKKREKGKISNKKPVKSNNMATNGCILLGETTEKINAEREQPVQCDEMDCTSQRCIIDNNNLLVNELDFADHGQDSSSLSTSKSSEIEPKLDKKQDDLAPSETCLKKELSQCNCIDLSKSPDPDKSTGTDCRSNLETESSHQSVCTDTSATSCNCKATEDASDLNDDDNLPTQELYYVFDKFILTSGKPPTIVCSICKKDGHSKNDCPEDFRKIDLKPLPPMTNRFREILDLVCKRCFDELSPPCSEQHNREQILIGLEKFIQKEYDEKARLCLFGSSKNGFGFRDSDLDICMTLEGHENAEKLNCKEIIENLAKILKRHPGLRNILPITTAKVPIVKFEHRRSGLEGDISLYNTLAQHNTRMLATYAAIDPRVQYLGYTMKVFAKIFDGKQIPQRMVDGWNAFFFDKTEELKKRLPSLGKNTESL

SEQ ID NO: 345 - protein, 343 aa, Homo sapiens
MEESKTLKSENHEPKKNVICEESKAVQVIGNQTLKARNDKSVKEIENSSPNRNSSKKNKQNDICIEKTEVKSCKVNAANLPGPKDLGLVLRDQSHCKAKKFPNSPVKAEKATISQAKSEKATSLQAKAEKSPKSPNSVKAEKASSYQMKSEKVPSSPAEAEKGPSLLLKDMRQKTELQQIGKKIPSSFTSVDKVNIEAVGGEKCALQNSPRSQKQQTCTDNTGDSDDSASGIEDVSDDLSKMKNDESNKENSSEMDYLENATVIDESALTPEQRLGLKQAEERLERDHIFRLEKRSPEYTNCRYLCKLCLIHIENIQGAHKHIKEKRHKKNILNVHLGCMAHL

SEQ ID NO: 346 - protein, 309 aa, Homo sapiens
MEESKTLKSENHEPKKNVICEESKAVQVIGNQTLKARNDKSVKEIENSSPNRNSSKKNKQNDICIEKTEVKSCKVNAANLPGPKDLGLVLRDQSHCKAKKFPNSPVKAEKATISQAKSEKATSLQAKAEKSPKSPNSVKAEKASSYQMKSEKVPSSPAEAEKGPSLLLKDMRQKTELQQIGKKIPSSFTSVDKVNIEAVGGEKCALQNSPRSQKQQTCTDNTGDSDDSASGIEDVSDDLSKMKNDESNKENSSEMDYLENATVIDESALTPEQRLGLKQAEERLERDHIFRLEKVYYVVLVIWGEMCVS

SEQ ID NO: 347 - protein, 87 aa, Homo sapiens
MEESKTLKSENHEPKKNVICEESKAVQVIGNQTLKARNDKSVKEIENSSPNRNSSKKNKQNDICIEKTEVKSCKVNAANLPGPKDLG

SEQ ID NO: 348 - protein, 77 aa, Homo sapiens
MEESKTLKSENHEPKKNVICEESKAVQVIGNQTLKARNDKSVKEIENSSPNRNSSKKNKQNDICIEKTEVKSCKVNA

SEQ ID NO: 349 - protein, 25 aa, Artificial Sequence
  Description of Artificial Sequence: Synthetic peptide
MMMINKQLDQRTDASAKDPRVPVAT

SEQ ID NO: 350 - protein, 4 aa, Homo sapiens
DEAD

SEQ ID NO: 351 - protein, 8 aa, Artificial Sequence
  Description of Artificial Sequence: Synthetic peptide
AAGPTDGR

SEQ ID NO: 352 - protein, 6 aa, Artificial Sequence
  Description of Artificial Sequence: Synthetic peptide
VLRFLK

SEQ ID NO: 353 - protein, 22 aa, Artificial Sequence
  Description of Artificial Sequence: Synthetic peptide
QDSPHGIPLITGILDLIALFSK
